(19) United States
(12) Patent Application Publication
(10) Pub. No.: US 2003/0050231 A1
(43) Pub. Date: Mar. 13, 2003

(54) Nucleic acids, proteins, and antibodies

(76) Inventors: Craig A. Rosen, Laytonsville, MD (US); Steven M. Ruben, Olney, MD (US); Steven C. Barash, Rockville, MD (US)

Correspondence Address: HUMAN GENOME SCIENCES INC, 9410 KEY WEST AVENUE, ROCKVILLE, MD, 20850

(21) Appl. No.: 09/764,872

(22) Filed: Jan. 17, 2001

Related U.S. Application Data
(60) Provisional application No. 60/179,065, filed on Jan. 31, 2000.
(60) Provisional application No. 60/180,628, filed on Feb. 4, 2000.
(60) Provisional application No. 60/214,886, filed on Jun. 28, 2000.
(60) Provisional application No. 60/217,487, filed on Jul. 11, 2000.
(60) Provisional application No. 60/225,758, filed on Aug. 14, 2000.
(60) Provisional application No. 60/220,963, filed on Jul. 26, 2000.
(60) Provisional application No. 60/217,496, filed on Jul. 11, 2000.
(60) Provisional application No. 60/225,447, filed on Aug. 14, 2000.
(60) Provisional application No. 60/218,290, filed on Jul. 14, 2000.
(60) Provisional application No. 60/225,757, filed on Aug. 14, 2000.
(60) Provisional application No. 60/226,868, filed on Aug. 22, 2000.
(60) Provisional application No. 60/216,647, filed on Jul. 7, 2000.
(60) Provisional application No. 60/225,267, filed on Aug. 14, 2000.
(60) Provisional application No. 60/216,880, filed on Jul. 7, 2000.
(60) Provisional application No. 60/225,270, filed on Aug. 14, 2000.
(60) Provisional application No. 60/251,869, filed on Dec. 8, 2000.
(60) Provisional application No. 60/235,834, filed on Sep. 27, 2000.
(60) Provisional application No. 60/234,274, filed on Sep. 21, 2000.
(60) Provisional application No. 60/234,223, filed on Sep. 21, 2000.
(60) Provisional application No. 60/228,924, filed on Aug. 30, 2000.
(60) Provisional application No. 60/224,518, filed on Aug. 14, 2000.
(60) Provisional application No. 60/236,369, filed on Sep. 29, 2000.
(60) Provisional application No. 60/224,519, filed on Aug. 14, 2000.
(60) Provisional application No. 60/220,964, filed on Jul. 26, 2000.
(60) Provisional application No. 60/241,809, filed on Oct. 20, 2000.
(60) Provisional application No. 60/249,299, filed on Nov. 17, 2000.
(60) Provisional application No. 60/236,327, filed on Sep. 29, 2000.
(60) Provisional application No. 60/241,785, filed on Oct. 20, 2000.
(60) Provisional application No. 60/244,617, filed on Nov. 1, 2000.
(60) Provisional application No. 60/225,268, filed on Aug. 14, 2000.
(60) Provisional application No. 60/236,368, filed on Sep. 29, 2000.
(60) Provisional application No. 60/251,856, filed on Dec. 8, 2000.
(60) Provisional application No. 60/251,868, filed on Dec. 8, 2000.
(60) Provisional application No. 60/229,344, filed on Sep. 1, 2000.
(60) Provisional application No. 60/234,997, filed on Sep. 25, 2000.
(60) Provisional application No. 60/229,343, filed on Sep. 1, 2000.
(60) Provisional application No. 60/229,345, filed on Sep. 1, 2000.
(60) Provisional application No. 60/229,287, filed on Sep. 1, 2000.
(60) Provisional application No. 60/229,513, filed on Sep. 5, 2000.
(60) Provisional application No. 60/231,413, filed on Sep. 8, 2000.
(60) Provisional application No. 60/229,509, filed on Sep. 5, 2000.
(60) Provisional application No. 60/236,367, filed on Sep. 29, 2000.
(60) Provisional application No. 60/237,039, filed on Oct. 2, 2000.
(60) Provisional application No. 60/237,038, filed on Oct. 2, 2000.
(60) Provisional application No. 60/236,370, filed on Sep. 29, 2000.
(60) Provisional application No. 60/236,802, filed on Oct. 2, 2000.
(60) Provisional application No. 60/237,037, filed on Oct. 2, 2000.
(60) Provisional application No. 60/237,040, filed on Oct. 2, 2000.
(60) Provisional application No. 60/240,960, filed on Oct. 20, 2000.
(60) Provisional application No. 60/239,935, filed on Oct. 13, 2000.
(60) Provisional application No. 60/239,937, filed on Oct. 13, 2000.
(60) Provisional application No. 60/241,787, filed on Oct. 20, 2000.
(60) Provisional application No. 60/246,474, filed on Nov. 8, 2000.
(60) Provisional application No. 60/246,532, filed on Nov. 8, 2000.
(60) Provisional application No. 60/249,216, filed on Nov. 17, 2000.
(60) Provisional application No. 60/249,210, filed on Nov. 17, 2000.
(60) Provisional application No. 60/226,681, filed on Aug. 22, 2000.
(60) Provisional application No. 60/225,759, filed on Aug. 14, 2000.
(60) Provisional application No. 60/225,213, filed on Aug. 14, 2000.
(60) Provisional application No. 60/227,182, filed on Aug. 22, 2000.
(60) Provisional application No. 60/225,214, filed on Aug. 14, 2000.
(60) Provisional application No. 60/235,836, filed on Sep. 27, 2000.
(60) Provisional application No. 60/230,438, filed on Sep. 6, 2000.
(60) Provisional application No. 60/215,135, filed on Jun. 30, 2000.
(60) Provisional application No. 60/225,266, filed on Aug. 14, 2000.
(60) Provisional application No. 60/249,218, filed on Nov. 17, 2000.
(60) Provisional application No. 60/249,208, filed on Nov. 17, 2000.
(60) Provisional application No. 60/249,213, filed on Nov. 17, 2000.
(60) Provisional application No. 60/249,212, filed on Nov. 17, 2000.
(60) Provisional application No. 60/249,207, filed on Nov. 17, 2000.
(60) Provisional application No. 60/249,245, filed on Nov. 17, 2000.
(60) Provisional application No. 60/249,244, filed on Nov. 17, 2000.
(60) Provisional application No. 60/249,217, filed on Nov. 17, 2000.
(60) Provisional application No. 60/249,211, filed on Nov. 17, 2000.
(60) Provisional application No. 60/249,215, filed on Nov. 17, 2000.
(60) Provisional application No. 60/249,264, filed on Nov. 17, 2000.
(60) Provisional application No. 60/249,214, filed on Nov. 17, 2000.
(60) Provisional application No. 60/249,297, filed on Nov. 17, 2000.
(60) Provisional application No. 60/232,400, filed on Sep. 14, 2000.
(60) Provisional application No. 60/231,242, filed on Sep. 8, 2000.
(60) Provisional application No. 60/232,081, filed on Sep. 8, 2000.
(60) Provisional application No. 60/232,080, filed on Sep. 8, 2000.
(60) Provisional application No. 60/231,414, filed on Sep. 8, 2000.
(60) Provisional application No. 60/231,244, filed on Sep. 8, 2000.
(60) Provisional application No. 60/233,064, filed on Sep. 14, 2000.
(60) Provisional application No. 60/233,063, filed on Sep. 14, 2000.
(60) Provisional application No. 60/232,397, filed on Sep. 14, 2000.
(60) Provisional application No. 60/232,399, filed on Sep. 14, 2000.
(60) Provisional application No. 60/232,401, filed on Sep. 14, 2000.
(60) Provisional application No. 60/241,808, filed on Oct. 20, 2000.
(60) Provisional application No. 60/241,826, filed on Oct. 20, 2000.
(60) Provisional application No. 60/241,786, filed on Oct. 20, 2000.
(60) Provisional application No. 60/241,221, filed on Oct. 20, 2000.
(60) Provisional application No. 60/246,475, filed on Nov. 8, 2000.
(60) Provisional application No. 60/231,243, filed on Sep. 8, 2000.
(60) Provisional application No. 60/233,065, filed on Sep. 14, 2000.
(60) Provisional application No. 60/232,398, filed on Sep. 14, 2000.
(60) Provisional application No. 60/234,998, filed on Sep. 25, 2000.
(60) Provisional application No. 60/246,477, filed on Nov. 8, 2000.
(60) Provisional application No. 60/246,528, filed on Nov. 8, 2000.
(60) Provisional application No. 60/246,525, filed on Nov. 8, 2000.
(60) Provisional application No. 60/246,476, filed on Nov. 8, 2000.
(60) Provisional application No. 60/246,526, filed on Nov. 8, 2000.
(60) Provisional application No. 60/249,209, filed on Nov. 17, 2000.
(60) Provisional application No. 60/246,527, filed on Nov. 8, 2000.
(60) Provisional application No. 60/246,523, filed on Nov. 8, 2000.
(60) Provisional application No. 60/246,524, filed on Nov. 8, 2000.
(60) Provisional application No. 60/246,478, filed on Nov. 8, 2000.
(60) Provisional application No. 60/246,609, filed on Nov. 8, 2000.
(60) Provisional application No. 60/246,613, filed on Nov. 8, 2000.
(60) Provisional application No. 60/249,300, filed on Nov. 17, 2000.
(60) Provisional application No. 60/249,265, filed on Nov. 17, 2000.
(60) Provisional application No. 60/246,610, filed on Nov. 8, 2000.
(60) Provisional application No. 60/246,611, filed on Nov. 8, 2000.
(60) Provisional application No. 60/230,437, filed on Sep. 6, 2000.
(60) Provisional application No. 60/251,990, filed on Dec. 8, 2000.
(60) Provisional application No. 60/251,988, filed on Dec. 5, 2000.
(60) Provisional application No. 60/251,030, filed on Dec. 5, 2000.
(60) Provisional application No. 60/251,479, filed on Dec. 6, 2000.
(60) Provisional application No. 60/256,719, filed on Dec. 5, 2000.
(60) Provisional application No. 60/250,160, filed on Dec. 1, 2000.
(60) Provisional application No. 60/251,989, filed on Dec. 8, 2000.
(60) Provisional application No. 60/250,391, filed on Dec. 1, 2000.
(60) Provisional application No. 60/254,097, filed on Dec. 11, 2000.
(60) Provisional application No. 60/231,968, filed on Sep. 12, 2000.
(60) Provisional application No. 60/226,279, filed on Aug. 18, 2000.
(60) Provisional application No. 60/186,350, filed on Mar. 2, 2000.
(60) Provisional application No. 60/184,664, filed on Feb. 24, 2000.
(60) Provisional application No. 60/189,874, filed on Mar. 16, 2000.
(60) Provisional application No. 60/198,123, filed on Apr. 18, 2000.
(60) Provisional application No. 60/227,009, filed on Aug. 23, 2000.
(60) Provisional application No. 60/235,484, filed on Sep. 26, 2000.
(60) Provisional application No. 60/190,076, filed on Mar. 17, 2000.
(60) Provisional application No. 60/209,467, filed on Jun. 7, 2000.
(60) Provisional application No. 60/205,515, filed on May 19, 2000.
(60) Provisional application No. 60/259,678, filed on Jan. 5, 2001.

(51) Int. Cl. A61K 38/17; C07H 21/04; C12N 9/00; C07K 14/435; C12P 21/02; C12N 5/06

(52) U.S. Cl. 514/12; 536/23.2; 530/350; 435/69.1; 435/183; 435/325; 435/320.1

(57) ABSTRACT

The present invention relates to novel colon related polynucleotides and the polypeptides encoded by these polynucleotides herein collectively known as “colon antigens,” and the use of such colon antigens for detecting disorders of the colon, particularly the presence of colon cancer and colon cancer metastases. More specifically, isolated colon associated nucleic acid molecules are provided encoding novel colon associated polypeptides. Novel colon polypeptides and antibodies that bind to these polypeptides are provided. Also provided are vectors, host cells, and recombinant and synthetic methods for producing human colon associated polynucleotides and/or polypeptides. The invention further relates to diagnostic and therapeutic methods useful for diagnosing, treating, preventing and/or prognosing disorders related to the colon, including colon cancer, and therapeutic methods for treating such disorders. The invention further relates to screening methods for identifying agonists and antagonists of polynucleotides and polypeptides of the invention. The present invention further relates to methods and/or compositions for inhibiting the production and function of the polypeptides of the present invention.

### STATEMENT UNDER 37 C.F.R. §1.77(b)(4)

[0001] This application refers to a “Sequence Listing” listed below, which is provided as an electronic document on two identical compact discs (CD-R), labeled “Copy 1” and “Copy 2.” These compact discs each contain the following files, which are hereby incorporated in their entirety herein:

| Document | File Name | Size in bytes | Date of Creation |
|---|---|---|---|
| Sequence Listing | PA125_seqListing.txt | 1,562,087 | 01/16/2001 |
| V Viewer Setup File | SetupDLL.exe | 695,808 | 12/19/2000 |
| V Viewer Help File Controller | v.cnt | 7,984 | 01/05/2001 |
| V Viewer Program File | v.exe | 753,664 | 12/19/2000 |
| V Viewer Help File | v.hlp | 447,766 | 01/05/2001 |

[0002] The Sequence Listing may be viewed on an IBM-PC machine running the MS-Windows operating system by using the V viewer software, licensed by HGS, Inc., included on the compact discs (see World Wide Web URL: http://www.fileviewer.com).

### FIELD OF THE INVENTION

[0003] The present invention relates to novel colon related polynucleotides, the polypeptides encoded by these polynucleotides herein collectively referred to as “colon antigens,” and antibodies that immunospecifically bind these polypeptides, and the use of such colon polynucleotides, antigens, and antibodies for detecting, treating, preventing and/or prognosing disorders of the colon, including, but not limited to, the presence of colon cancer and colon cancer metastases. More specifically, isolated colon nucleic acid molecules are provided encoding novel colon polypeptides. Novel colon polypeptides and antibodies that bind to these polypeptides are provided. Also provided are vectors, host cells, and recombinant and synthetic methods for producing human colon polynucleotides, polypeptides, and/or antibodies. The invention further relates to diagnostic and therapeutic methods useful for diagnosing, treating, preventing and/or prognosing disorders related to the colon, including colon cancer, and therapeutic methods for treating such disorders. The invention further relates to screening methods for identifying agonists and antagonists of polynucleotides and polypeptides of the invention. The invention further relates to methods and/or compositions for inhibiting or promoting the production and/or function of the polypeptides of the invention.

### BACKGROUND OF THE INVENTION

[0004] The human colon, a portion of the large intestine, extends from the end of the small intestine and cecum up the right side of the abdomen (ascending colon), across to the left side (transverse colon), down the left side (descending colon), and loops (simoid flexure or sigmoid colon) to join the rectum. In humans, the colon has no digestive function, but instead lubricates waste products, adsorbs remaining fluids and salts, and stores waste products unti they are ready to be passed from the body. Most adsorption occurs in the ascending and transverse regions, where the liquid material received from the small intestine is dehydrated to form a fecal mass.

[0005] The inner wall of the colon consists of a mucous membrane that adsorbs the fluids and gives off mucus to lubricate the waste materials. The deeper muscle layer is composed of circular and longitudinal muscles. Circular muscles produce the mild churning and mixing motions of the intestine, while the longitudinal ones create the strong massive muscle contractions that actually move the feces. Disorders and diseases associated with the colon range from constipation, diarrhea, gas discomfort, and colitis (inflammation of the colon), to the more serious megacolon (enlarged colon) and cancer. Some of these are discussed in more detail below.

[0006] Disorders of the colon include congenital abnormalities, such as atresia and stenosis, Meckel diverticulum, congenital aganglionic megacolon or Hirschsprung's Disease. Abnormal rotation of the colon is fairly frequent and occasionally leads to disorders. Unusually long mesenteries (the supporting tissues of the large intestine) may permit recurrent twisting, cutting off the blood supply to the involved loop. Brain disease, metabolic failure, or drugs can dull the normal signals that give rise to the urge to defecate. Poor abdominal musculature or a poor pelvic floor makes it difficult to mobilize effective pressures to bring about defecation.

[0007] Aganglionic megacolon, or Hirschsprung's disease is an idiopathic condition analogous to achalasia of the esophagus. It is characterized by the absence of ganglion cells and normal nerve fibres from the distal (or lower) portion of the large intestine, which results in reduced neuromuscular transmission and ceased peristalsis. The entire colon slowly becomes more and more distended and thick-walled. A related disorder, acquired megacolon, is commonly caused by a combination of faulty toilet training and emotional disorders during childhood, in which the child withholds defecation. This starts a cycle of the administration of increasing amounts of laxatives with, ultimately, damage to the intrinsic innervation in the intestinal wall. A huge, dilated rectum full of feces develops over the years and act as an obstruction, leading to voluminus dilatation of the whole colon in some cases. The same phenomenon is occasionally encountered in those with schizophrenia and severe depression.

[0008] Arteries penetrate the muscular walls of the colon from its outside covering, the serosa, and distribute themselves in the submucosa. With aging, and perhaps in persons predisposed to the disorder, the channels in which these arteries lie may become larger and potentially herniate. If the peristaltic activity of the colon maintains a high pressure within its lumen, as in patients straining to defecate, the mucous membrane of the colon may be driven slowly into these channels and eventually may follow the arteries back to their site of colonic entrance in the serosa. At such time, the outward-pushing mucosa becomes a budding sac, or diverticulum. In the Western world, multiple colonic diverticula occur in as many as 30 percent of persons older than 50 years. Diverticula are particularly common in those whose diets are deficient in fibre (roughage), and they are rare in countries where high-fibre diets are usual.

[0009] The principal dangers of diverticulosis are massive hemorrhage and inflammation. Hemorrhage results from the action of hard stools against the aging, less elastic, arteries of the colon that are exposed and unsupported because of diverticula. Diverticulitis, on the other hand, occurs when the narrow necks of the diverticula become plugged with debris or inedible foodstuff and bacteria (uninhibited by the usual motor activity that keeps the intestine clean) which proliferate in the blind sacs. When the sacs enlarge, the adjacent intestinal wall becomes inflamed and irritable, muscle spasms occur, and the patient experiences abdominal pain and fever. If the sacs continue to enlarge, they may rupture into the peritoneum, giving rise to peritonitis, or an inflammation of the peritoneum. More commonly they fix themselves to neighbouring organs and produce localized abscesses, which may prove difficult to treat surgically. Mild diverticulitis responds well to conservative treatment and to antibiotics; massive hemorrhages often require emergency surgery. Recurrent diverticulitis requires resection of the affected area of the colon.

[0010] Fungal and bacterial infections are also common causes of colon disorders. The colon may become inflammed and ulcerate because of invasion by pathogenic bacteria (e.g., Shigella spp., Salmonella spp., Vibrio cholerae, Escherichia coli, Yersinia enterocolitica), parasites or protozoa (e.g., amoeba), or viral infection (e.g., cytomegalic virus, rotovirus). For example, Shigella species may attack the mucous membrane of the colon and produce an intense but rather superficial hemorrhage; Salmonella species may damage the lymph follicles of the colon, but do not produce a generalized inflammation of the colon; cytomegalic virus can cause a severe colitis producing ulcerations; Lymphopathia venereum can cause a more generalized and superficial colitis. The most important parasite producing disease in the human colon is the protozoan Entamoeba histolytica lodge in the cecum and ascending colon, undermine the mucosal coat, and may create large ulcerations that bleed impressively. Stools contain blood, but there is little pus or other evidence of reaction by the colon to the invading organism. In more generalized amoebic colitis, the rectum and sigmoid colon are invaded by E. histolytica, which manifest their presence by numerous discrete ulcerations separated from each other by a relatively normal-appearing mucous membrane. The amoebas may enter the portal circulation and be carried to the liver, where abscesses form and sometimes rupture into the chest or the abdominal cavity.

[0011] Inflammatory bowel disease (IBD) is a blanket term for diseases that cause swelling and inflammation in the digestive tract wall. There are two types of IBD: Crohn's disease and ulcerative colitis. Ulcerative colitis causes inflammation and sores (ulcers) in the top layers of the lining of the lower intestine, or colon, often including the rectum. Crohn's disease—an equally common illness—leads to sores that extend deeper in the digestive tract wall and can affect any portion of the gastrointestinal tract, from mouth to anus. For some people, inflammatory bowel disease is little more than a nuisance, but many patients face serious threats to their health. Extreme cases of Crohn's disease can produce holes in the intestine, causing air and stool to leak into the abdominal cavity, leading to an inflammation there that is known as peritonitis. Or the sores can tunnel through the bowel wall to penetrate other organs, such as the bladder or skin, to form what doctors call fistulas. In still other people, the intestines become blocked by scar tissue or even partially paralyzed; the latter condition, known as toxic megacolon (far more common with ulcerative colitis than Crohn's disease), can lead to rupture of the colon. In many of these more serious cases, emergency surgery may be necessary to save the affected person's life. IBD can also raise a person's risk of developing colon cancer.

[0012] Tumors of the colon are usually polyps or cancers. A peculiar form of polyp is the villous adenoma, often a slowly growing, fernlike structure that spreads along the surface of the colon for some distance. In the West, cancer of the colon is a more common tumor than is cancer of the stomach, and it occurs about equally in both sexes. Cancers compress the colonic lumen to produce obstruction, they attach to neighbouring structures to produce pain, and they perforate to give rise to peritonitis. Cancers also may metastasize to distant organs before local symptoms appear.

[0013] Colorectal cancers are among the most common cancers in men and women in the U.S. and are one of the leading causes of death. Other than surgical resection no other systemic or adjuvant therapy is available. Vogelstein and colleagues have described the sequence of genetic events that appear to be associated with the multistep process of colon cancer development in humans (Trends Genet 9(4):138-41 (1993)). An understanding of the molecular genetics of carcinogenesis, however, has not led to preventative or therapeutic measures. It can be expected that advances in molecular genetics will lead to better risk assessment and early diagnosis but colorectal cancers will remain a deadly disease for a majority of patients due to the lack of an adjuvant therapy. Adjuvant or systemic treatments are likely to arise from a better understanding of the autocrine factors responsible for the continued proliferation of cancer cells.

[0014] Colorectal carcinoma is a malignant neoplastic disease. Many patients with colorectal carcinoma eventually die from this disease. In fact, it is estimated that 62,000 persons in the United States alone die of colorectal carcinoma annually. At the present time the only systemic treatment available for colon cancer is chemotherapy. However, chemotherapy has not proven to be very effective for the treatment of colon cancers for several reasons, the most important of which is the fact that colon cancers express high levels of the MDR gene (that codes for multi-drug resistance gene products). The MDR gene products actively transport the toxic substances out of the cell before the chemotherapeutic agents can damage the DNA machinery of the cell. These toxic substances harm the normal cell populations more than they harm the colon cancer cells for the above reasons.

[0015] There is no effective systemic treatment for treating colon cancers other than surgically removing the cancers. In the case of several other cancers, including breast cancers, the knowledge of growth promoting factors (such as EGF, estradiol, IGF-11) that appear to be expressed or effect the growth of the cancer cells, has been translated for treatment purposes. But in the case of colon cancers this knowledge has not been applied and therefore the treatment outcome for colon cancers remains bleak.

[0016] There is a need, therefore, for identification and characterization of such factors that modulate activation and differentiation of colon cells, both normally and in disease states. In particular, there is a need to isolate and characterize additional molecules that mediate apoptosis, DNA repair, tumor-mediated angiogenesis, genetic imprinting, immune responses to tumors and tumor antigens and, among other things, that can play a role in detecting, preventing, ameliorating or correcting dysfunctions or diseases of the colon.

[0017] The discovery of new human colon associated polynucleotides, the polypeptides encoded by them, and antibodies that immunospecifically bind these polypeptides, satisfies a need in the art by providing new compositions which are useful in the diagnosis, treatment, prevention and/or prognosis of disorders of the colon, including, but not limited to, congenital abnormalities, such as atresia and stenosis, Meckel diverticulum, congential aganglionic megacolon or Hirschsprung disease; colonic diverticulitis, colonic diverticulosis, toxic megacolon, constipation, disorders caused by parasites and protozoa (e.g., amoebic colitis, anisakiasis, balantidiasis, blastocystis infections, cryptosporidiosis, dientamoebiasis, amoebic dysentery, giardiasis, Lymphopathia venereum, Entamoeba histolytica), bacteria infection (e.g., Shigella, Salmonella, Yersinia, E. coli, Clostridium difficile), viral infection (e.g., cytomegalic virus, rotovirus); inflammatory bowel disease (e.g., ulcerative colitis, Crohn's disease, eosinophilic colitis); neoplastic disorders, such as, polyps (e.g., sessile polyp, adenomatous polyp, inflammatory polyps), adenomas (e.g., tubular adenoma, tubovillous adenomas, villous adenoma, Gardner syndrome, Peutz-Jeghers syndrome), hyperplastic, polyposis, villous, pseudopolyps, leiomyomas, carcinoids, lipomas, and angiomas, cancers, such as, rectal cancer, adenocarcinoma, colorectal carcinoma, colon cancer, colon carcinoma, colorectal cancer; colonic diseases); miscellaneous intestinal inflammatory disorders, including acquired immunodeficiency syndrome, HIV enteropathy, transplantation, drug-induced intestinal injury, radiation enterocolitis, neutropenic colitis, diverticular colon disease (DCD), inflammatory colonic disease, ischemic colitis, radiation proctitis, non-inflammatory bowel disease (non-IBD), colonic inflammation; colitis (e.g., infectious enterocolitis, necrotizing enterocolitis, antibiotic-associated colitis (pseudomembranous colitis), and collagenous and lymphocytic colitis); diarrhea and dysentary, malabsorption syndromes (e.g., blind loop syndrome, lactose intolerance, short bowl syndrome, whipple's disease), mesenteric vascular occlusion, pneumatosis cystoides intestinalis, protein-losing enteropathies (intestinal lymphagiectasis); intestinal obstruction (e.g., afferent loop syndrome, impacted feces, intestinal pseudo-obstruction [cecal volvulus], intussusception), intestinal perforation, sigmoid diseases (e.g., proctocolitis, sigmoin neoplasms), and/or as described under “Gastrointestinal Disorders” below.

### SUMMARY OF THE INVENTION

[0018] The present invention relates to novel colon related polynucleotides, the polypeptides encoded by these polynucleotides herein collectively referred to as “colon antigens,” and antibodies that immunospecifically bind these polypeptides, and the use of such colon polynucleotides, antigens, and antibodies for detecting, treating, preventing and/or prognosing disorders of the colon, including, but not limited to, the presence of colon cancer and colon cancer metastases. More specifically, isolated colon nucleic acid molecules are provided encoding novel colon polypeptides. Novel colon polypeptides and antibodies that bind to these polypeptides are provided. Also provided are vectors, host cells, and recombinant and synthetic methods for producing human colon polynucleotides, polypeptides, and/or antibodies. The invention further relates to diagnostic and therapeutic methods useful for diagnosing, treating, preventing and/or prognosing disorders related to the colon, including colon cancer, and therapeutic methods for treating such disorders. The invention further relates to screening methods for identifying agonists and antagonists of polynucleotides and polypeptides of the invention. The invention further relates to methods and/or compositions for inhibiting or promoting the production and/or function of the polypeptides of the invention.

### DETAILED DESCRIPTION

[0019] Tables

[0020] Table 1A summarizes some of the polynucleotides encompassed by the invention (including cDNA clones related to the sequences (Clone ID NO:Z), contig sequences (contig identifier (Contig ID:) and contig nucleotide sequence identifier (SEQ ID NO:X)) and further summarizes certain characteristics of these polynucleotides and the polypeptides encoded thereby. The first column provides a unique clone identifier, “Clone ID NO:Z”, for a cDNA plasmid related to each colon associated contig sequence disclosed in Table 1A. The second column provides a unique contig identifier, “Contig ID:” for each of the contig sequences disclosed in Table 1A. The third column provides the sequence identifier, “SEQ ID NO:X”, for each of the contig polynucleotide sequences disclosed in Table 1A. The fourth column, “ORF (From-To)”, provides the location (i.e., nucleotide position numbers) within the polynucleotide sequence of SEQ ID NO:X that delineate the preferred open reading frame (ORF) shown in the sequence listing and referenced in Table 1A as SEQ ID NO:Y (column 5). Column 6 lists residues comprising predicted epitopes contained in the polypeptides encoded by each of the preferred ORFs (SEQ ID NO:Y). Identification of potential immunogenic regions was performed according to the method of Jameson and Wolf (CABIOS, 4:181-186 (1988)); specifically, the Genetics Computer Group (GCG) implementation of this algorithm, embodied in the program PEPTIDESTRUCTURE (Wisconsin Package v10.0, Genetics Computer Group (GCG), Madison, Wis.). This method returns a measure of the probability that a given residue is found on the surface of the protein. Regions where the antigenic index score is greater than 0.9 over at least 6 amino acids are indicated in Table 1A as “Predicted Epitopes.” In particular embodiments, colon associated polypeptides of the invention comprise, or alternatively consist of, one, two, three, four, five or more of the predicted epitopes described in Table 1A. It will be appreciated that depending on the analytical criteria used to predict antigenic determinants, the exact address of the determinant may vary slightly. Column 7, “Tissue Distribution” shows the expression profile of tissue, cells, and/or cell line libraries which express the polynucleotides of the invention. The first number in column 7 (preceding the colon), represents the tissue/cell source identifier code corresponding to the code and description provided in Table 4. Expression of these polynucleotides was not observed in the other tissues and/or cell libraries tested. For those identifier codes in which the first two letters are not “AR”, the second number in column 7 (following the colon), represents the number of times a sequence corresponding to the reference polynucleotide sequence (e.g., SEQ ID NO:X) was identified in the tissue/cell source. Those tissue/cell source identifier codes in which the first two letters are “AR” designate information generated using DNA array technology. Utilizing this technology, cDNAs were amplified by PCR and then transferred, in duplicate, onto the array. Gene expression was assayed through hybridization of first strand cDNA probes to the DNA array. cDNA probes were generated from total RNA extracted from a variety of different tissues and cell lines. Probe synthesis was performed in the presence of ³³P dCTP, using oligo(dT) to prime reverse transcription. After hybridization, high stringency washing conditions were employed to remove non-specific hybrids from the array. The remaining signal, emanating from each gene target, was measured using a Phosphorimager. Gene expression was reported as Phosphor Stimulating Luminescence (PSL) which reflects the level of phosphor signal generated from the probe hybridized to each of the gene targets represented on the array. A local background signal subtraction was performed before the total signal generated from each array was used to normalize gene expression between the different hybridizations. The value presented after “[array code]:” represents the mean of the duplicate values, following background subtraction and probe normalization. One of skill in the art could routinely use this information to identify normal and/or diseased tissue(s) which show a predominant expression pattern of the corresponding polynucleotide of the invention or to identify polynucleotides which show predominant and/or specific tissue and/or cell expression. Column 8, “Cytologic Band,” provides the chromosomal location of polynucleotides corresponding to SEQ ID NO:X. Chromosomal location was determined by finding exact matches to EST and cDNA sequences contained in the NCBI (National Center for Biotechnology Information) UniGene database. Given a presumptive chromosomal location, disease locus association was determined by comparison with the Morbid Map, derived from Online Mendelian Inheritance in Man (Online Mendelian Inheritance in Man, OMIM™. McKusick-Nathans Institute for Genetic Medicine, Johns Hopkins University (Baltimore, Md.) and National Center for Biotechnology Information, National Library of Medicine (Bethesda, Md.) 2000. World Wide Web URL: http://www.ncbi.nlm.nih.gov/omim/). If the putative chromosomal location of the Query overlapped with the chromosomal location of a Morbid Map entry, an OMIM identification number is provided in column 9 labeled “OMIM Disease Reference(s)”. A key to the OMIM reference identification numbers is provided in Table 5.

[0021] Table 1B summarizes additional polynucleotides encompassed by the invention (including cDNA clones related to the sequences (Clone ID NO:Z), contig sequences (contig identifier (Contig ID:) contig nucleotide sequence identifiers (SEQ ID NO:X)), and genomic sequences (SEQ ID NO:B). The first column provides a unique clone identifier, “Clone ID NO:Z”, for a cDNA clone related to each contig sequence. The second column provides the sequence identifier, “SEQ ID NO:X”, for each contig sequence. The third column provides a unique contig identifier, “Contig ID:” for each contig sequence. The fourth column, provides a BAC identifier “BAC ID NO:A” for the BAC clone referenced in the corresponding row of the table. The fifth column provides the nucleotide sequence identifier, “SEQ ID NO:B” for a fragment of the BAC clone identified in column four of the corresponding row of the table. The sixth column, “Exon From-To”, provides the location (i.e., nucleotide position numbers) within the polynucleotide sequence of SEQ ID NO:B which delineate certain polynucleotides of the invention that are also exemplary members of polynucleotide sequences that encode polypeptides of the invention (e.g., polypeptides containing amino acid sequences encoded by the polynucleotide sequences delineated in column six, and fragments and variants thereof).

[0022] Table 2 summarizes homology and features of some of the polypeptides of the invention. The first column provides a unique clone identifier, “Clone ID NO:Z”, corresponding to a cDNA disclosed in Table 1A. The second column provides the unique contig identifier, “Contig ID:” corresponding to contigs in Table 1A and allowing for correlation with the information in Table 1A. The third column provides the sequence identifier, “SEQ ID NO:X”, for the contig polynucleotide sequences. The fourth column provides the analysis method by which the homology/identity disclosed in the row was determined. Comparisons were made between polypeptides encoded by the polynucleotides of the invention and either a non-redundant protein database (herein referred to as “NR”), or a database of protein families (herein referred to as “PFAM”) as further described below. The fifth column provides a description of PFAM/NR hits having significant matches to a polypeptide of the invention. Column six provides the accession number of the PFAM/NR hit disclosed in the fifth column. Column seven, “Score/Percent Identity”, provides a quality score or the percent identity, of the hit disclosed in column five. Columns 8 and 9, “NT From” and “NT To” respectively, delineate the polynucleotides in “SEQ ID NO:X” that encode a polypeptide having a significant match to the PFAM/NR database as disclosed in the fifth column. In specific embodiments, polypeptides of the invention comprise, or alternatively consist of, an amino acid sequence encoded by the polynucleotides in SEQ ID NO:X as delineated in columns 8 and 9, or fragments or variants thereof.

[0023] Table 3 provides polynucleotide sequences that may be disclaimed according to certain embodiments of the invention. The first column provides a unique clone identifier, “Clone ID NO:Z”, for a cDNA clone related to colon associated contig sequences disclosed in Table 1A. The second column provides the sequence identifier, “SEQ ID NO:X”, for contig polynucleotide sequences disclosed in Table 1A. The third column provides the unique contig identifier, “Contig ID”, for contigs disclosed in Table 1A. The fourth column provides a unique integer ‘a’ where ‘a’ is any integer between 1 and the final nucleotide minus 15 of SEQ ID NO:X, represented as “Range of a”, and the fifth column provides a unique integer ‘b’ where ‘b’ is any integer between 15 and the final nucleotide of SEQ ID NO:X, represented as “Range of b”, where both a and b correspond to the positions of nucleotide residues shown in SEQ ID NO:X, and where b is greater than or equal to a+14. For each of the polynucleotides shown as SEQ ID NO:X, the uniquely defined integers can be substituted into the general formula of a-b, and used to describe polynucleotides which may be preferably excluded from the invention. In certain embodiments, preferably excluded from the polynucleotides of the invention (including polynucleotide fragments and variants as described herein and diagnostic and/or therapeutic uses based on these polynucleotides) are at least one, two, three, four, five, ten, or more of the polynucleotide sequence(s) having the accession number(s) disclosed in the sixth column of this Table (including for example, published sequence in connection with a particular BAC clone). In further embodiments, preferably excluded from the invention are the specific polynucleotide sequence(s) contained in the clones corresponding to at least one, two, three, four, five, ten, or more of the available material having the accession numbers identified in the sixth column of this Table (including for example, the actual sequence contained in an identified BAC clone).

[0024] Table 4 provides a key to the tissue/cell source identifier code disclosed in Table 1A, column 7. Column 1 provides the key to the tissue/cell source identifier code disclosed in Table 1A, Column 7. Columns 2-5 provide a description of the tissue or cell source. Codes corresponding to diseased tissues are indicated in column 6 with the word “disease”. The use of the word “disease” in column 6 is non-limiting. The tissue or cell source may be specific (e.g. a neoplasm), or may be disease-associated (e.g., a tissue sample from a normal portion of a diseased organ). Furthermore, tissues and/or cells lacking the “disease” designation may still be derived from sources directly or indirectly involved in a disease state or disorder, and therefore may have a further utility in that disease state or disorder. In numerous cases where the tissue/cell source is a library, column 7 identifies the vector used to generate the library.

[0025] Table 5 provides a key to the OMIM™ reference identification numbers disclosed in Table 1A, column 9. OMIM reference identification numbers (Column 1) were derived from Online Mendelian Inheritance in Man (Online Mendelian Inheritance in Man, OMIM™. McKusick-Nathans Institute for Genetic Medicine, Johns Hopkins University (Baltimore, Md.) and National Center for Biotechnology Information, National Library of Medicine, (Bethesda, Md.) 2000. World Wide Web URL: http://www.ncbi.nlm.nih.gov/omirn/). Column 2 provides diseases associated with the cytologic band disclosed in Table 1A, column 8, as determined from the Morbid Map database.

[0026] Table 6 summarizes ATCC Deposits, Deposit dates, and ATCC designation numbers of deposits made with the ATCC in connection with the present application.

[0027] Table 7 shows the cDNA libraries sequenced, tissue source description, vector information and ATCC designation numbers relating to these cDNA libraries.

[0028] Table 8 provides a physical characterization of clones encompassed by the invention. The first column provides the unique clone identifier, “Clone ID NO:Z”, for certain cDNA clones of the invention, as described in Table 1A. The second column provides the size of the cDNA insert contained in the corresponding cDNA clone.

[0029] Definitions

[0030] The following definitions are provided to facilitate understanding of certain terms used throughout this specification.

[0031] In the present invention, “isolated” refers to material removed from its original environment (e.g., the natural environment if it is naturally occurring), and thus is altered “by the hand of man” from its natural state. For example, an isolated polynucleotide could be part of a vector or a composition of matter, or could be contained within a cell, and still be “isolated” because that vector, composition of matter, or particular cell is not the original environment of the polynucleotide. The term “isolated” does not refer to genomic or cDNA libraries, whole cell total or mRNA preparations, genomic DNA preparations (including those separated by electrophoresis and transferred onto blots), sheared whole cell genomic DNA preparations or other compositions where the art demonstrates no distinguishing features of the polynucleotide sequences of the present invention.

[0032] As used herein, a “polynucleotide” refers to a molecule having a nucleic acid sequence encoding SEQ ID NO:Y or a fragment or variant thereof; a nucleic acid sequence contained in SEQ ID NO:X (as described in column 3 of Table 1A) or the complement thereof; a cDNA sequence contained in Clone ID NO:Z (as described in column 1 of Table 1A and contained within a library deposited with the ATCC); a nucleotide sequence encoding the polypeptide encoded by a nucleotide sequence in SEQ ID NO:B as defined in column 6 of Table 1B or a fragment or variant thereof; or a nucleotide coding sequence in SEQ ID NO:B as defined in column 6 of Table 1B or the complement thereof. For example, the polynucleotide can contain the nucleotide sequence of the full length cDNA sequence, including the 5′ and 3′ untranslated sequences, the coding region, as well as fragments, epitopes, domains, and variants of the nucleic acid sequence. Moreover, as used herein, a “polypeptide” refers to a molecule having an amino acid sequence encoded by a polynucleotide of the invention as broadly defined (obviously excluding poly-Phenylalanine or poly-Lysine peptide sequences which result from translation of a polyA tail of a sequence corresponding to a cDNA).

[0033] As used herein, a “colon antigen” refers collectively to any polynucleotide disclosed herein (e.g., a nucleic acid sequence contained in SEQ ID NO:X or the complement therof, or cDNA sequence contained in Clone ID NO:Z, or a nucleotide sequence encoding the polypeptide encoded by a nucleotide sequence in SEQ ID NO:B as defined in column 6 of Table 1B, or a nucleotide coding sequence in SEQ ID NO:B as defined in column 6 of Table 1B or the complement thereof and fragments or variants thereof as described herein) or any polypeptide disclosed herein (e.g., an amino acid sequence contained in SEQ ID NO:Y, an amino acid sequence encoded by SEQ ID NO:X, or the complement thereof, an amino acid sequence encoded by the cDNA sequence contained in Clone ID NO:Z, an amino acid sequence encoded by SEQ ID NO:B, or the complement thereof, and fragments or variants thereof as described herein). These colon antigens have been determined to be predominantly expressed in colon tissues, including normal or diseased tissues (as shown in Table 1A column 7 and Table 4).

[0034] In the present invention, “SEQ ID NO:X” was often generated by overlapping sequences contained in multiple clones (contig analysis). A representative clone containing all or most of the sequence for SEQ ID NO:X is deposited at Human Genome Sciences, Inc. (HGS) in a catalogued and archived library. As shown, for example, in column 1 of Table 1A, each clone is identified by a cDNA Clone ID (identifier generally referred to herein as Clone ID NO:Z). Each Clone ID is unique to an individual clone and the Clone ID is all the information needed to retrieve a given clone from the HGS library. Furthermore, certain clones disclosed in this application have been deposited with the ATCC on Oct. 5, 2000, having the ATCC designation numbers PTA 2574 and PTA 2575; and on Jan. 5, 2001, having the depositor reference numbers TS-1, TS-2, AC-1, and AC-2. In addition to the individual cDNA clone deposits, most of the cDNA libraries from which the clones were derived were deposited at the American Type Culture Collection (hereinafter “ATCC”). Table 7 provides a list of the deposited cDNA libraries. One can use the Clone ID NO:Z to determine the library source by reference to Tables 6 and 7. Table 7 lists the deposited cDNA libraries by name and links each library to an ATCC Deposit. Library names contain four characters, for example, “HTWE.” The name of a cDNA clone (Clone ID NO:Z) isolated from that library begins with the same four characters, for example “HTWEP07”. As mentioned below, Table 1A correlates the Clone ID NO:Z names with SEQ ID NO:X. Thus, starting with an SEQ ID NO:X, one can use Tables 1, 6 and 7 to determine the corresponding Clone ID NO:Z, which library it came from and which ATCC deposit the library is contained in. Furthermore, it is possible to retrieve a given cDNA clone from the source library by techniques known in the art and described elsewhere herein. The ATCC is located at 10801 University Boulevard, Manassas, Va. 20110-2209, USA. The ATCC deposits were made pursuant to the terms of the Budapest Treaty on the international recognition of the deposit of microorganisms for the purposes of patent procedure.

[0035] In specific embodiments, the polynucleotides of the invention are at least 15, at least 30, at least 50, at least 100, at least 125, at least 500, or at least 1000 continuous nucleotides but are less than or equal to 300 kb, 200 kb, 100 kb, 50 kb, 15 kb, 10 kb, 7.5 kb, 5 kb, 2.5 kb, 2.0 kb, or 1 kb, in length. In a further embodiment, polynucleotides of the invention comprise a portion of the coding sequences, as disclosed herein, but do not comprise all or a portion of any intron. In another embodiment, the polynucleotides comprising coding sequences do not contain coding sequences of a genomic flanking gene (i.e., 5′ or 3′ to the gene of interest in the genome). In other embodiments, the polynucleotides of the invention do not contain the coding sequence of more than 1000, 500, 250, 100, 50, 25, 20, 15, 10, 5, 4, 3, 2, or 1 genomic flanking gene(s).

[0036] A “polynucleotide” of the present invention also includes those polynucleotides capable of hybridizing, under stringent hybridization conditions, to sequences contained in SEQ ID NO:X, or the complement thereof (e.g., the complement of any one, two, three, four, or more of the polynucleotide fragments described herein), the polynucleotide sequence delineated in columns 8 and 9 of Table 2 or the complement thereof, and/or cDNA sequences contained in Clone ID NO:Z (e.g., the complement of any one, two, three, four, or more of the polynucleotide fragments, or the cDNA clone within the pool of cDNA clones deposited with the ATCC, described herein) and/or the polynucleotide sequence delineated in column 6 of Table 1B or the complement thereof. “Stringent hybridization conditions” refers to an overnight incubation at 42 degree C. in a solution comprising 50% formamide, 5×SSC (750 mM NaCl, 75 mM trisodium citrate), 50 mM sodium phosphate (pH 7.6), 5×Denhardt's solution, 10% dextran sulfate, and 20 μg/ml denatured, sheared salmon sperm DNA, followed by washing the filters in 0.1×SSC at about 65 degree C.

[0037] Also contemplated are nucleic acid molecules that hybridize to the polynucleotides of the present invention at lower stringency hybridization conditions. Changes in the stringency of hybridization and signal detection are primarily accomplished through the manipulation of formamide concentration (lower percentages of formamide result in lowered stringency), salt conditions, or temperature. For example, lower stringency conditions include an overnight incubation at 37 degree C. in a solution comprising 6×SSPE (20×SSPE=3M NaCl; 0.2M NaH₂PO₄; 0.02M EDTA, pH 7.4), 0.5% SDS, 30% formamide, 100 ug/ml salmon sperm blocking DNA; followed by washes at 50 degree C. with 1×SSPE, 0.1% SDS. In addition, to achieve even lower stringency, washes performed following stringent hybridization can be done at higher salt concentrations (e.g. 5×SSC).

[0038] Note that variations in the above conditions may be accomplished through the inclusion and/or substitution of alternate blocking reagents used to suppress background in hybridization experiments. Typical blocking reagents include Denhardt's reagent, BLOTTO, heparin, denatured salmon sperm DNA, and commercially available proprietary formulations. The inclusion of specific blocking reagents may require modification of the hybridization conditions described above, due to problems with compatibility.

[0039] Of course, a polynucleotide which hybridizes only to polyA+ sequences (such as any 3′ terminal polyA+ tract of a cDNA shown in the sequence listing), or to a complementary stretch of T (or U) residues, would not be included in the definition of “polynucleotide,” since such a polynucleotide would hybridize to any nucleic acid molecule containing a poly (A) stretch or the complement thereof (e.g., practically any double-stranded cDNA clone generated using oligo dT as a primer).

[0040] The polynucleotide of the present invention can be composed of any polyribonucleotide or polydeoxribonucleotide, which may be unmodified RNA or DNA or modified RNA or DNA. For example, polynucleotides can be composed of single- and double-stranded DNA, DNA that is a mixture of single- and double-stranded regions, single- and double-stranded RNA, and RNA that is mixture of single- and double-stranded regions, hybrid molecules comprising DNA and RNA that may be single-stranded or, more typically, double-stranded or a mixture of single- and double-stranded regions. In addition, the polynucleotide can be composed of triple-stranded regions comprising RNA or DNA or both RNA and DNA. A polynucleotide may also contain one or more modified bases or DNA or RNA backbones modified for stability or for other reasons. “Modified” bases include, for example, tritylated bases and unusual bases such as inosine. A variety of modifications can be made to DNA and RNA; thus, “polynucleotide” embraces chemically, enzymatically, or metabolically modified forms.

[0041] The polypeptide of the present invention can be composed of amino acids joined to each other by peptide bonds or modified peptide bonds, i.e., peptide isosteres, and may contain amino acids other than the 20 gene-encoded amino acids. The polypeptides may be modified by either natural processes, such as posttranslational processing, or by chemical modification techniques which are well known in the art. Such modifications are well described in basic texts and in more detailed monographs, as well as in a voluminous research literature. Modifications can occur anywhere in a polypeptide, including the peptide backbone, the amino acid side-chains and the amino or carboxyl termini. It will be appreciated that the same type of modification may be present in the same or varying degrees at several sites in a given polypeptide. Also, a given polypeptide may contain many types of modifications. Polypeptides may be branched, for example, as a result of ubiquitination, and they may be cyclic, with or without branching. Cyclic, branched, and branched cyclic polypeptides may result from posttranslation natural processes or may be made by synthetic methods. Modifications include acetylation, acylation, ADP-ribosylation, amidation, covalent attachment of flavin, covalent attachment of a heme moiety, covalent attachment of a nucleotide or nucleotide derivative, covalent attachment of a lipid or lipid derivative, covalent attachment of phosphotidylinositol, cross-linking, cyclization, disulfide bond formation, demethylation, formation of covalent cross-links, formation of cysteine, formation of pyroglutamate, formylation, gamma-carboxylation, glycosylation, GPI anchor formation, hydroxylation, iodination, methylation, myristoylation, oxidation, pegylation, proteolytic processing, phosphorylation, prenylation, racemization, selenoylation, sulfation, transfer-RNA mediated addition of amino acids to proteins such as arginylation, and ubiquitination. (See, for instance, PROTEINS—STRUCTURE AND MOLECULAR PROPERTIES, 2nd Ed., T. E. Creighton, W. H. Freeman and Company, New York (1993); POSTTRANSLATIONAL COVALENT MODIFICATION OF PROTEINS, B. C. Johnson, Ed., Academic Press, New York, pgs. 1-12 (1983); Seifter et al., Meth. Enzymol. 182:626-646 (1990); Rattan et al., Ann. N.Y. Acad. Sci. 663:48-62 (1992).)

[0042] “SEQ ID NO:X” refers to a polynucleotide sequence described, for example, in Tables 1 or 2, while “SEQ ID NO:Y” refers to a polypeptide sequence described in column 5 of Table 1A. SEQ ID NO:X is identified by an integer specified in column 3 of Table 1A. The polypeptide sequence SEQ ID NO:Y is a translated open reading frame (ORF) encoded by polynucleotide SEQ ID NO:X. “Clone ID NO:Z” refers to a cDNA clone described in column 1 of Table 1A.

[0043] “A polypeptide having biological activity” refers to a polypeptide exhibiting activity similar to, but not necessarily identical to, an activity of a polypeptide of the present invention, including mature forms, as measured in a particular biological assay, with or without dose dependency. In the case where dose dependency does exist, it need not be identical to that of the polypeptide, but rather substantially similar to the dose-dependence in a given activity as compared to the polypeptide of the present invention (i.e., the candidate polypeptide will exhibit greater activity or not more than about 25-fold less and, preferably, not more than about tenfold less activity, and most preferably, not more than about three-fold less activity relative to the polypeptide of the present invention).

[0044] Table 1A summarizes some of the polynucleotides encompassed by the invention (including contig sequences (SEQ ID NO:X) and clones (Clone ID NO:Z) and further summarizes certain characteristics of these polynucleotides and the polypeptides encoded thereby.

[0045] Polynucleotides and Polypeptides

TABLE 1A

| | | | | AA | | Tissue Distribution | | |
|---|---|---|---|---|---|---|---|---|
| | | SEQ | | SEQ | | Library code: count | | OMIM |
| Clone ID | Contig | ID NO: | ORF | ID | | (see Table IV for | Cytologic | Disease |
| NO: Z | ID: | X | (From-To) | NO: Y | Predicted Epitopes | Library Codes) | Band | Reference(s): |
| HCNAC10 | 968738 | 11 | 15-167 | 245 | | H0085: 2 | | |
| HCNAG07 | 954493 | 12 | 2-157 | 246 | | H0085: 2 and H0597: 1. | | |
| HCNAK56 | 832249 | 13 | 1-99 | 247 | | H0085: 1 and H0231: 1. | | |
| HCNAL66 | 832247 | 14 | 437-180 | 248 | | H0085: 1, H0597: 1, | | |
| | | | | | | L0775: 1 and L0748: 1. | | |
| HCNAN69 | 655816 | 15 | 1-318 | 249 | Pro-28 to Arg-34, | H0085: 2 | | |
| | | | | | Cys-40 to Arg-45, | | | |
| | | | | | Pro-49 to Asp-56. | | | |
| HCNAO20 | 832251 | 16 | 69-314 | 250 | Phe-24 to Thr-36, | H0085: 2, L0748: 2 | | |
| | | | | | Pro-60 to Thr-70. | and H0597: 1. | | |
| HCNAR21 | 948746 | 17 | 68-154 | 251 | Arg-1 to Ile-6. | H0085: 2 | | |
| HCNAX26 | 832250 | 18 | 64-216 | 252 | Arg-23 to Ser-30. | H0085: 1 and H0597: 1. | | |
| HCNCF73 | 762056 | 19 | 13-291 | 253 | Tyr-54 to Lys-59. | H0597: 2 | | |
| HCNCH64 | 922009 | 20 | 3-311 | 254 | | H0597: 2 | | |
| HCNCN84 | 766990 | 21 | 1-270 | 255 | Pro-59 to Pro-66. | H0597: 2 | | |
| HCNCQ79 | 832242 | 22 | 118-2 | 256 | | H0085: 1 and H0597: 1. | | |
| HCNCU02 | 918993 | 23 | 2-265 | 257 | Arg-1 to Lys-14, | H0597: 2 | | |
| | | | | | Arg-19 to Pro-27. | | | |
| HCNCV19 | 832221 | 24 | 59-193 | 258 | Lys-14 to Ile-19. | H0085: 1 and H0597: 1. | | |
| HCNCY39 | 960373 | 25 | 2-151 | 259 | Thr-1 to Asn-10. | H0597: 1 and H0231: 1. | | |
| HCNDB53 | 832225 | 26 | 7-177 | 260 | (Gly-26 to Gln-31. | H0085: 1 and H0597: 1. | | |
| HCNDD83 | 832230 | 27 | 116-271 | 261 | | H0597: 1 and H0231: 1. | | |
| HCNDF20 | 669111 | 28 | 258-46 | 262 | | H0597: 2 | | |
| HCNDG69 | 666726 | 29 | 134-295 | 263 | | H0597: 2 | | |
| HCNDH18 | 832215 | 30 | 2-202 | 264 | | H0085: 1 and H0597: 1. | | |
| HCNDI01 | 832213 | 31 | 116-286 | 265 | | H0085: 1 and H0597: 1. | | |
| HCNDL91 | 832209 | 32 | 54-260 | 266 | | S0358: 1 and H0597: 1. | | |
| HCNDN43 | 832212 | 33 | 85-291 | 267 | | H0597: 1 and H0231: 1. | | |
| HCNDQ50 | 723976 | 34 | 106-234 | 268 | | H0597: 2 | | |
| HCNDV42 | 927262 | 35 | 26-151 | 269 | | H0597: 2 | | |
| HCNSM15 | 914484 | 36 | 2-289 | 270 | Pro-39 to Ser-47. | S0354: 1, H0231: 1 | | |
| | | | | | | and L0740: 1. | | |
| HCNSP37 | 655829 | 37 | 120-260 | 271 | Leu-12 to His-23. | H0231: 2 | | |
| HCNSQ03 | 832200 | 38 | 53-205 | 272 | Lys-33 to Pro-41. | S0354: 1 and H0231: 1. | | |
| HCNUA60 | 695786 | 39 | 15-245 | 273 | Arg-5 to Arg-15. | AR089: 4, AR061: 2 | | |
| | | | | | | H0232: 2 | | |
| HCNUA84 | 522523 | 40 | 3-194 | 274 | | H0232: 2 | | |
| HOCNE77 | 832202 | 41 | 2-217 | 275 | Thr-7 to Gly-17. | S0442: 1 and S0374: 1. | | |
| HWLAL74 | 761974 | 42 | 26-166 | 276 | Arg-34 to Thr-40. | S0374: 2 | | |
| HWLBI74 | 839518 | 43 | 210-380 | 277 | Pro-35 to Gly-43. | S0374: 2 | | |
| HWLBK76 | 731099 | 44 | 8-163 | 278 | | S0374: 2 and L0604: 1. | | |
| HWLBK80 | 933865 | 45 | 116-547 | 279 | Glu-11 to Gly-16, | AR089: 7, AR061: 2 | | |
| | | | | | Gln-28 to Phe-44, | S0374: 2 | | |
| | | | | | Pro-59 to Asp-68, | | | |
| | | | | | Arg-73 to Gly-80. | | | |
| HWLED58 | 830330 | 46 | 169-444 | 280 | Ser-1 to Arg-11, | S0354: 3 | | |
| | | | | | Ser-22 to Ala-33. | | | |
| HWLEF86 | 785193 | 47 | 152-3 | 281 | | S0354: 2 | | |
| HWLEH06 | 934649 | 48 | 187-555 | 282 | Glu-1 to Leu-6, | S0354: 2 | | |
| | | | | | Lys-37 to Gly-49, | | | |
| | | | | | Arg-80 to Gly-87, | | | |
| | | | | | Arg-92 to Ala-97. | | | |
| HWLEI16 | 729050 | 49 | 163-318 | 283 | Ser-15 to Asp-25. | S0354: 2 | | |
| HWLEJ07 | 952396 | 50 | 49-252 | 284 | Val-49 to Leu-56. | S0354: 2 | | |
| HWLEK39 | 918545 | 51 | 3-371 | 285 | Arg-35 to Glu-40, | S0354: 2 | | |
| | | | | | Pro-44 to Arg-52. | | | |
| HWLEN08 | 958509 | 52 | 2-808 | 286 | Arg-1 to Asp-6, | S0354: 2 | | |
| | | | | | Glu-35 to Cys-59, | | | |
| | | | | | Glu-62 to Leu-69, | | | |
| | | | | | Arg-72 to Lys-89, | | | |
| | | | | | Leu-97 to Phe-104, | | | |
| | | | | | Val-108 to Lys-135, | | | |
| | | | | | Gln-141 to Lys-149, | | | |
| | | | | | Ile-156 to Ser-163, | | | |
| | | | | | Lys-173 to Gly-206, | | | |
| | | | | | Gly-235 to Gly-247. | | | |
| HWLEN20 | 963418 | 53 | 105-311 | 287 | Gly-6 to Gly-11, | S0354: 6 | | |
| | | | | | Glu-17 to Leu-24, | | | |
| | | | | | Pro-44 to Thr-49. | | | |
| HWLEO59 | 974078 | 54 | 3-212 | 288 | Lys-1 to Gly-7, | S0354: 11 | | |
| | | | | | Ala-21 to Ser-26, | | | |
| | | | | | Arg-61 to Ala-66. | | | |
| HWLEP95 | 751199 | 55 | 161-445 | 289 | Ala-17 to Val-34, | S0354: 2 | | |
| | | | | | Arg-36 to Pro-45. | | | |
| HWLEQ36 | 966250 | 56 | 68-256 | 290 | Leu-1 to Ser-11, | S0354: 2 | | |
| | | | | | Asp-29 to Thr-35, | | | |
| | | | | | Ser-44 to Ser-56. | | | |
| HWLEQ81 | 934224 | 57 | 70-222 | 291 | Glu-1 to Lys-15, | S0354: 2 | | |
| | | | | | Gln-17 to Ser-22. | | | |
| HWLER88 | 915168 | 58 | 21-143 | 292 | Lys-11 to His-23. | S0354: 2 | | |
| HWLFB08 | 849136 | 59 | 2-520 | 293 | Glu-10 to Leu-24, | S0354: 2 | | |
| | | | | | Lys-42 to Ala-48, | | | |
| | | | | | Thr-105 to Ser-114. | | | |
| HWLFC80 | 830279 | 60 | 180-311 | 294 | Gly-34 to Arg-44. | S0354: 2 and S0358: 1. | | |
| HWLFE50 | 830283 | 61 | 419-592 | 295 | | S0354: 3, L0515: 1 | | |
| | | | | | | and L0779: 1. | | |
| HWLFF40 | 830287 | 62 | 1-102 | 296 | Asn-2 to Phe-7. | S0354: 3 | | |
| HWLFF62 | 915155 | 63 | 85-420 | 297 | Gln-22 to Pro-29, | S0354: 2 | | |
| | | | | | Pro-39 to Pro-44. | | | |
| HWLFH47 | 719752 | 64 | 30-167 | 298 | | S0354: 2 | | |
| HWLFJ51 | 853602 | 65 | 79-210 | 299 | | S0354: 3 | | |
| HWLFK50 | 918539 | 66 | 150-302 | 300 | | S0354: 2 | | |
| HWLFO70 | 756554 | 67 | 167-397 | 301 | | S0354: 2 | | |
| HWLFO82 | 779461 | 68 | 253-429 | 302 | Arg-22 to Glu-29. | S0354: 2 | | |
| HWLFO92 | 791052 | 69 | 3-137 | 303 | | S0354: 2 | | |
| HWLFP37 | 708985 | 70 | 125-436 | 304 | Lys-63 to Ser-69. | S0354: 2 | | |
| HWLFP46 | 882848 | 71 | 2-235 | 305 | Thr-21 to Lys-32, | S0354: 2 | | |
| | | | | | Val-68 to Gly-77. | | | |
| HWLFQ48 | 721154 | 72 | 77-211 | 306 | | S0354: 2 | | |
| HWLFS01 | 915531 | 73 | 192-374 | 307 | | S0354: 2 | | |
| HWLFS86 | 830246 | 74 | 393-557 | 308 | | S0354: 4 | | |
| HWLFV61 | 922924 | 75 | 1-147 | 309 | | S0354: 2 | | |
| HWLFW01 | 915527 | 76 | 105-515 | 310 | Thr-25 to Gln-30, | S0354: 2 | | |
| | | | | | Ser-37 to Ile-43. | | | |
| HWLGL36 | 806724 | 77 | 295-429 | 311 | | S0354: 2 | | |
| HWLGP10 | 883139 | 78 | 37-318 | 312 | Ser-40 to Pro-46, | S0354: 3 | | |
| | | | | | Lys-51 to Gly-56, | | | |
| | | | | | Pro-89 to Arg-94. | | | |
| HWLGP21 | 958259 | 79 | 2-88 | 313 | | S0354: 2 | | |
| HWLGR72 | 958284 | 80 | 73-300 | 314 | Asn-25 to Ser-33. | S0442: 1 and S0354: 1. | | |
| HWLGT12 | 966044 | 81 | 36-350 | 315 | Thr-51 to Asp-60, | S0354: 3 | | |
| | | | | | Pro-78 to Thr-89. | | | |
| HWLGX56 | 830329 | 82 | 125-394 | 316 | Thr-42 to Ala-48, | S0354: 6 | | |
| | | | | | Gln-54 to Leu-78, | | | |
| | | | | | Thr-82 to Asn-89. | | | |
| HWLHC73 | 830319 | 83 | 365-496 | 317 | | S0354: 4 | | |
| HWLHP05 | 931087 | 84 | 201-389 | 318 | | S0354: 2 | | |
| HWLHR93 | 952387 | 85 | 1-381 | 319 | Thr-31 toTrp-36. | S0354: 2 | | |
| HWLHT06 | 934217 | 86 | 38-235 | 320 | Ile-3 to Leu-11, | S0354: 2 | | |
| | | | | | Leu-27 to Gly-37, | | | |
| | | | | | Pro-50 to Val-66. | | | |
| HWLHT92 | 830322 | 87 | 228-458 | 321 | | S0354: 3 | | |
| HWLIC75 | 830321 | 88 | 1-57 | 322 | Arg-1 to Gly-8, | S0358: 4 | | |
| | | | | | Lys-14 to Lys-19. | | | |
| HWLIF03 | 830233 | 89 | 3-167 | 323 | | S0358: 8 | | |
| HWLIL65 | 747440 | 90 | 133-282 | 324 | Leu-18 to Lys-30. | S0358: 2 | | |
| HWLIM37 | 712654 | 91 | 14-88 | 325 | Arg-1 to Cys-7, | S0358: 2, L0766: 2, | | |
| | | | | | Arg-12 to Tyr-19. | L0757: 2, L0731: 1 and | | |
| | | | | | | L0608: 1. | | |
| HWLIO73 | 761965 | 92 | 1-72 | 326 | | S0358: 2 | | |
| HWLIS62 | 722358 | 93 | 148-444 | 327 | His-68 to Arg-74, | S0358: 2 | Xq12-q13.3 | 300011, |
| | | | | | Ser-79 to Pro-86. | | | 300011, |
| | | | | | | | | 300011, |
| | | | | | | | | 300127, |
| | | | | | | | | 305450, |
| | | | | | | | | 309605, |
| | | | | | | | | 313700, |
| | | | | | | | | 313700, |
| | | | | | | | | 313700, |
| | | | | | | | | 313700, |
| | | | | | | | | 313700, |
| | | | | | | | | 314580 |
| HWLIW68 | 925892 | 94 | 235-378 | 328 | | S0358: 2 | | |
| HWLJB04 | 926066 | 95 | 233-364 | 329 | | S0358: 2, L0774: 1 | | |
| | | | | | | and L0756: 1. | | |
| HWLJC30 | 830232 | 96 | 2-538 | 330 | Pro-23 to Lys-39, | S0358: 3, L0764: 2, | | |
| | | | | | Ser-44 to Leu-74, | L0803: 2, S0354: 1, | | |
| | | | | | Lys-77 to Leu-83, | H0085: 1, L0646: 1, | | |
| | | | | | Phe-101 to Asn-106, | L0775: 1, L0789: 1 and | | |
| | | | | | Pro-122 to Trp-130, | L0666: 1. | | |
| | | | | | Asn-151 to Asp-157, | | | |
| | | | | | Ala-159 to Pro-168. | | | |
| HWLJE89 | 928258 | 97 | 460-585 | 331 | | S0358: 4 | | |
| HWLJG57 | 849123 | 98 | 240-404 | 332 | Ser-26 to Leu-31. | S0358: 3 and L0558: 1. | | |
| HWLJL14 | 832205 | 99 | 41-319 | 333 | Pro-62 to Ser-67, | S0358: 1 and H0231: 1. | | |
| | | | | | Asn-76 to His-81. | | | |
| HWLJL46 | 830226 | 100 | 87-200 | 334 | | S0358: 6 | | |
| HWLJN66 | 830229 | 101 | 304-513 | 335 | Glu-26 to Ser-35. | S0358: 5 | | |
| HWLJP79 | 963698 | 102 | 263-445 | 336 | Asp-29 to His-36. | S0358: 3 | 4 | |
| HWLJX38 | 925868 | 103 | 3-86 | 337 | | S0358: 7 | | |
| HWLJZ30 | 925870 | 104 | 2-400 | 338 | Ile-1 to Cys-9, | S0358: 4 | | |
| | | | | | Asp-13 to Ser-20, | | | |
| | | | | | Gln-44 to Gly-49, | | | |
| | | | | | His-116 to Val-121. | | | |
| HWLKC87 | 956205 | 105 | 2-133 | 339 | Phe-32 to Arg-38. | AR089: 5, AR061: 3 | | |
| | | | | | | S0358: 2 | | |
| HWLKF70 | 830237 | 106 | 103-327 | 340 | | S0358: 3 | | |
| HWLKL17 | 928720 | 107 | 100-273 | 341 | Arg-10 to Asp-15. | S0358: 2 | | |
| HWLKR35 | 918557 | 108 | 3-521 | 342 | Gly-8 to Lys-15, | S0358: 4 | | |
| | | | | | Ser-20 to Gln-27, | | | |
| | | | | | Ser-30 to Met-36, | | | |
| | | | | | Pro-62 to Trp-75, | | | |
| | | | | | Pro-82 to Gly-113, | | | |
| | | | | | Thr-122 to Lys-135, | | | |
| | | | | | Gln-161 to Gly-169. | | | |
| HWLKV34 | 957615 | 109 | 361-489 | 343 | Thr-17 to Leu-25, | S0358: 5 | | |
| | | | | | Asp-38 to Lys-43. | | | |
| HWLKV91 | 830214 | 110 | 242-430 | 344 | | S0358: 4 and L0748: 1. | | |
| HWLKW04 | 969141 | 111 | 77-424 | 345 | Ser-17 to Leu-30, | AR089: 52, AR061: | | |
| | | | | | Pro-72 to Lys-81, | 26 | | |
| | | | | | Glu-86 to Ser-95, | S0358: 6 | | |
| | | | | | His-105 to Asn-116. | | | |
| HWLKW09 | 951716 | 112 | 373-570 | 346 | Leu-4 to Ser-11, | S0358: 3 | | |
| | | | | | Ser-37 to Ser-42, | | | |
| | | | | | Lys-45 to Ser-51. | | | |
| HWLKW17 | 860227 | 113 | 76-186 | 347 | | S0358: 7 | | |
| HWLLB11 | 954849 | 114 | 51-524 | 348 | Pro-1 to Glu-10, | AR061: 2, AR089: 2 | | |
| | | | | | His-60 to Arg-76, | S0358: 2, L0657: 1 | | |
| | | | | | Pro-79 to Arg-85, | and L0601: 1. | | |
| | | | | | Ala-95 to Ile-101, | | | |
| | | | | | Glu-124 to Glu-130, | | | |
| | | | | | Lys-151 to Arg-158. | | | |
| HWLLH02 | 918427 | 115 | 128-259 | 349 | Gln-9 to Arg-19, | S0358: 2 | | |
| | | | | | Cys-21 to Lys-28. | | | |
| HWLLH25 | 933479 | 116 | 31-135 | 350 | | S0358: 5 | | |
| HWLLS11 | 965899 | 117 | 106-318 | 351 | | S0358: 2, L0766: 1 | | |
| | | | | | | and L0776: 1. | | |
| HWLLT02 | 918419 | 118 | 2-253 | 352 | Lys-7 to Pro-12, | S0358: 2 | | |
| | | | | | His-43 to Glu-49. | | | |
| HWLLV41 | 830150 | 119 | 2-286 | 353 | Thr-3 to Val-11, | S0358: 7 and L0803: 1. | | |
| | | | | | Glu-53 to Ser-67. | | | |
| HWLLX12 | 969681 | 120 | 1-177 | 354 | | S0358: 3 | | |
| HWLPC29 | 965058 | 121 | 6-329 | 355 | Ser-17 to Asn-26, | S0354: 1, L0138: 1 | | |
| | | | | | Tyr-48 to Tyr-53. | and S0374: 1. | | |
| HWLPG05 | 930991 | 122 | 174-272 | 356 | | S0374: 3 | | |
| HWMAD05 | 931076 | 123 | 3-149 | 357 | Lys-32 to Ala-43. | S0354: 2 | | |
| HWMEI07 | 830227 | 124 | 14-139 | 358 | | S0358: 6 | | |
| HWMEL48 | 830256 | 125 | 264-157 | 359 | Lys-1 to Pro-15. | S0358: 19, S0114: 1 | | |
| | | | | | | and H0436: 1. | | |
| HWMEU56 | 922375 | 126 | 2-199 | 360 | Leu-12 to His-18. | S0358: 4 | | |
| HWMFA28 | 965354 | 127 | 3-173 | 361 | Ser-6 to Asn-16, | S0358: 8 | | |
| | | | | | Ser-33 to Pro-45. | | | |
| HWMFG10 | 963406 | 128 | 296-439 | 362 | | S0358: 2 | | |
| HWMFG32 | 883180 | 129 | 145-321 | 363 | | S0358: 4 | | |
| HWMFH23 | 849129 | 130 | 169-2 | 364 | Leu-21 to Ser-35. | S0358: 4 | | |
| HWMFQ90 | 928646 | 131 | 2-175 | 365 | Arg-45 to Trp-53. | S0358: 2 | | |
| HWMFY21 | 974325 | 132 | 104-298 | 366 | Pro-9 to Cys-23, | S0358: 2 | | |
| | | | | | Lys-31 to Ile-38. | | | |
| HWMGL13 | 947969 | 133 | 1-423 | 367 | Ser-4 to Thr-10, | S0358: 2 | | |
| | | | | | Trp-26 to Gly-31, | | | |
| | | | | | Pro-63 to Gly-71. | | | |
| HWMHG06 | 933534 | 134 | 253-399 | 368 | Val-7 to Ser-13. | S0358: 2 | | |
| HWMHG26 | 957665 | 135 | 129-326 | 369 | Pro-9 to Pro-27, | S0358: 2 and L0758: 1. | | |
| | | | | | Arg-39 to Glu-44, | | | |
| | | | | | Phe-61 to Leu-66. | | | |
| HWMHS10 | 961647 | 136 | 148-417 | 370 | Thr-22 to Ser-27, | S0358: 2 | | |
| | | | | | Glu-81 to Trp-87. | | | |
| HWMHT22 | 917570 | 137 | 82-297 | 371 | | S0358: 2 | | |
| HWMHX12 | 914007 | 138 | 3-737 | 372 | | S0358: 9 | | |
| HWMHZ25 | 951699 | 139 | 110-355 | 373 | Glu-26 to Phe-34. | S0358: 3 | | |
| HWMID39 | 915686 | 140 | 198-467 | 374 | Cys-6 to Thr-11. | S0358: 2 | | |
| HWMIR03 | 922302 | 141 | 208-53 | 375 | Glu-3 to Pro-9, | S0358: 2 | | |
| | | | | | Leu-28 to His-34. | | | |
| HWMJB68 | 914031 | 142 | 157-336 | 376 | Pro-55 to Leu-60. | S0358: 3 | | |
| HWMJE50 | 933501 | 143 | 32-76 | 377 | | S0358: 2 | | |
| HWMKI01 | 913841 | 144 | 2-226 | 378 | Ser-46 to Pro-67. | S0358: 2 and L0744: 1. | | |
| HWMKI10 | 961616 | 145 | 1-354 | 379 | Arg-19 to Gly-26. | S0358: 3 | 4q31 | 107250, |
| | | | | | | | | 181600, |
| | | | | | | | | 189800, |
| | | | | | | | | 266300 |
| HWMLG23 | 961110 | 146 | 2-247 | 380 | Pro-3 to Val-18, | S0358: 2 | | |
| | | | | | Val-34 to Ser-39, | | | |
| | | | | | Ala-73 to Ser-78. | | | |
| HWMMA12 | 969173 | 147 | 153-254 | 381 | Gln-1 to Asn-12, | S0358: 2 | | |
| | | | | | Lys-17 to Lys-30. | | | |
| HWMMG65 | 928823 | 148 | 513-782 | 382 | | S0358: 2, L0809: 2, | | |
| | | | | | | L0803: 1 and L0783: 1. | | |
| HWMMS65 | 917513 | 149 | 192-395 | 383 | | S0358: 2 | | |
| HWMMY66 | 966367 | 150 | 21-155 | 384 | Gly-1 to Val-18. | S0358: 2 | | |
| HWMNC07 | 951724 | 151 | 2-49 | 385 | Asp-7 to Lys-16. | S0358: 3 | | |
| HWMGO10 | 961716 | 152 | 23-169 | 386 | | S0358: 1, L0717: 1, | 21q22.2 | 176261, |
| | | | | | | L0770: 1, L0518: 1, | | 601399 |
| | | | | | | L0666: 1, L0747: 1 and | | |
| | | | | | | L0752: 1. | | |
| HWMAE12 | 969692 | 153 | 3-515 | 387 | Gln-6 to His-16, | S0354: 1, L0529: 1 | | |
| | | | | | Ser-39 to Met-45, | and L0741: 1. | | |
| | | | | | Asn-57 to Arg-71, | | | |
| | | | | | Glu-78 to Gln-83, | | | |
| | | | | | Val-110 to Thr-117, | | | |
| | | | | | Ser-130 to Val-147. | | | |
| HWLPN12 | 969572 | 154 | 170-337 | 388 | Thr-25 to Thr-39. | L0766: 2, S0374: 1, | | |
| | | | | | | L0759: 1 and L0485: 1. | | |
| HWLLZ91 | 887157 | 155 | 2-463 | 389 | Ser-35 to Ser-47. | AR051: 1, AR050: 1, | | |
| | | | | | | AR054: 0 | | |
| | | | | | | S0358: 1 | | |
| HWLLD02 | 930932 | 156 | 432-265 | 390 | | S0358: 1 and L0662: 1. | 10 | |
| HWLKT19 | 974292 | 157 | 1-261 | 391 | | S0358: 1 | | |
| HWLKQ11 | 965390 | 158 | 3-122 | 392 | | S0358: 1 | | |
| HWLKJ18 | 930414 | 159 | 207-473 | 393 | | S0358: 1 | | |
| HWLKJ03 | 922371 | 160 | 253-468 | 394 | | S0358: 1 and L0776: 1. | | |
| HWLJW12 | 969556 | 161 | 50-241 | 395 | Ser-32 to Trp-37, | S0358: 1 and L0764: 1. | | |
| | | | | | His-48 to Tyr-55. | | | |
| HWLJW11 | 924518 | 162 | 260-451 | 396 | Pro-23 to Ser-29. | S0358: 1 and L0747: 1. | | |
| HWLJU91 | 789882 | 163 | 45-254 | 397 | Ser-24 to His-40. | S0358: 1, L0748: 1 | | |
| | | | | | | and L0596: 1 | | |
| HWLJP28 | 925655 | 164 | 22-204 | 398 | | S0358: 1, L0766: 1 | | |
| | | | | | | and L0750: 1. | | |
| HWLJM40 | 710519 | 165 | 204-416 | 399 | Pro-33 to Lys-38, | S0358: 1 and L0747: 1. | | |
| | | | | | Lys-49 to Asn-57. | | | |
| HWLJK01 | 914089 | 166 | 334-504 | 400 | His-7 to Leu-12. | S0358: 1 and L0774: 1. | | |
| HWLIS95 | 795416 | 167 | 109-231 | 401 | | S0358: 1 and L0744: 1. | | |
| HWLIG05 | 928226 | 168 | 101-217 | 402 | | S0358: 1 and L0747: 1. | | |
| HWLID27 | 682563 | 169 | 275-427 | 403 | | S0358: 1 and L0754: 1. | | |
| HWLHW01 | 915161 | 170 | 193-351 | 404 | | S0354: 1, L0775: 1 | | |
| | | | | | | and L0758: 1. | | |
| HWLHU03 | 922931 | 171 | 218-406 | 405 | | L0539: 1 and S0354: 1. | | |
| HWLHK09 | 949288 | 172 | 276-707 | 406 | Ser-1 to Arg-12, | S0354: 1 and L0775: 1. | | |
| | | | | | Glu-19 to Arg-24, | | | |
| | | | | | Gly-36 to Ser-41, | | | |
| | | | | | Arg-73 to Pro-79. | | | |
| HWLHH62 | 876225 | 173 | 20-277 | 407 | Met-1 to Trp-10. | L0754: 2 and S0354: 1. | | |
| HWLHD19 | 887203 | 174 | 3-632 | 408 | | AR051: 11, AR050: 9, | | |
| | | | | | | AR054: 8 | | |
| | | | | | | S0354: 1 | | |
| HWLGV14 | 967914 | 175 | 46-444 | 409 | | AR061: 42, AR089: 3 | | |
| | | | | | | S0354: 1 and L0748: 1. | | |
| HWLGA04 | 925682 | 176 | 174-344 | 410 | | L0766: 3, S0354: 1 | | |
| | | | | | | and L0751: 1. | | |
| HWLFY91 | 789569 | 177 | 405-572 | 411 | His-8 to Met-14, | S0354: 1 and L0605: | | |
| | | | | | Gly-16 to Lys-31. | 1. | | |
| HWLFY06 | 934635 | 178 | 15-296 | 412 | Pro-12 to Gln-22, | L0749: 3, S0354: 1, | | |
| | | | | | Thr-34 to Phe-42, | L0769: 1 and L0806: 1. | | |
| | | | | | Leu-53 to Thr-65, | | | |
| | | | | | Leu-73 to Gly-80. | | | |
| HWLFV52 | 950978 | 179 | 70-357 | 413 | Pro-27 to Gly-34. | S0354: 1 and L0759: 1. | | |
| HWLFQ39 | 705200 | 180 | 3-236 | 414 | | L0438: 7, L0439: 5, | | |
| | | | | | | L0805: 2, L0415: 1, | | |
| | | | | | | S0354: 1, L0787: 1 and | | |
| | | | | | | L0741: 1 | | |
| HWLFM69 | 754644 | 181 | 2-559 | 415 | | L0777: 2 and S0354: 1. | | |
| HWLFH36 | 708387 | 182 | 2-142 | 416 | Arg-10 to Asp-15. | S0354: 1 and L0754: 1. | | |
| HWLFB71 | 759915 | 183 | 279-596 | 417 | Gln-11 to Glu-18, | S0354: 1 and L0748: | | |
| | | | | | Asn-57 to Glu-64. | 1. | | |
| HWLEZ11 | 966228 | 184 | 372-539 | 418 | Lys-24 to Gly-46. | S0354: 1 and L0605: 1. | | |
| HWLEQ61 | 741224 | 185 | 59-205 | 419 | Ser-18 to Trp-32. | L0439: 2 and S0354: 1. | | |
| HWLEM80 | 886651 | 186 | 27-671 | 420 | Arg-11 to Val-19, | AR051: 18, AR050: 1 | | |
| | | | | | Tyr-23 to Asp-48, | S0354: 1 | | |
| | | | | | Ser-61 to Gly-96. | | | |
| HWLEM01 | 915547 | 187 | 144-314 | 421 | | S0354: 1 and L0526: 1. | | |
| HWLEL08 | 860161 | 188 | 328-576 | 422 | Gly-17 to Arg-23, | AR050: 97, AR054: | | |
| | | | | | Arg-55 to His-60. | 84, AR051: 70 | | |
| | | | | | | S0354: 1 | | |
| | 908147 | 243 | 334-582 | 477 | Gly-17 to Arg-23, | | | |
| | | | | | Arg-55 to His-60. | | | |
| HWLEK75 | 766928 | 189 | 463-567 | 423 | | S0354: 1, L0742: 1, | | |
| | | | | | | L0748: 1 and L0592: 1. | | |
| HWLEI57 | 734267 | 190 | 389-195 | 424 | Thr-35 to Ala-43. | AR050: 109, AR051: | | |
| | | | | | | 105, AR054: 100 | | |
| | | | | | | S0354: 1 | | |
| HWLEH70 | 874721 | 191 | 2-454 | 425 | Gly-11 to Ser-23, | S0354: 1 and L0749: 1. | | |
| | | | | | Lys-41 to Gln-48, | | | |
| | | | | | Lys-70 to Asp-77. | | | |
| HWLEF27 | 682572 | 192 | 2-268 | 426 | Gln-6 to Pro-26, | S0354: 1 and L0439: 1. | | |
| | | | | | Pro-28 to Phe-44, | | | |
| | | | | | Arg-54 to Ile-67, | | | |
| | | | | | Leu-80 to Gly-89. | | | |
| HWLEA48 | 927676 | 193 | 100-408 | 427 | Pro-1 to Thr-8. | AR089: 1, Ar061: 0 | | |
| | | | | | | S0354: 1 and L0596: 1. | | |
| HWLDX03 | 922806 | 194 | 2-187 | 428 | Gly-13 to Trp-21. | L0763: 1, S0374: 1 | | |
| | | | | | | and L0747: 1. | | |
| HWLDB04 | 887051 | 195 | 1-297 | 429 | Pro-6 to Ser-11. | AR051: 25, AR054: | | |
| | | | | | | 20, AR050: 20, | | |
| | | | | | | AR089: 1, AR061: 0 | | |
| | | | | | | S0374: 1 | | |
| HWLCM06 | 934117 | 196 | 170-406 | 430 | | L0533: 1 and S0374: 1. | | |
| HWLCG42 | 975246 | 197 | 321-503 | 431 | Lys-11 to His-16, | L0641: 1 and S0374: | | |
| | | | | | Ser-28 to Thr-36, | 1. | | |
| | | | | | Ala-46 to Gln-55. | | | |
| HWLCD10 | 974071 | 198 | 485-102 | 432 | | S0374: 1 | | |
| HWLBO06 | 934630 | 199 | 22-243 | 433 | Pro-32 to Asp-61. | L0021: 1, L0803: 1, | | |
| | | | | | | S0374: 1 and L0752: 1. | | |
| HWLBN90 | 787355 | 200 | 392-610 | 434 | Gly-34 to Glu-41, | S0374: 1 and L0777: 1. | | |
| | | | | | Glu-46 to Arg-53, | | | |
| | | | | | Thr-62 to Val-68. | | | |
| HWLBL75 | 766877 | 201 | 305-601 | 435 | Asn-28 to Thr-34. | S0374: 1 and L0731: 1. | | |
| HWLBI01 | 919168 | 202 | 56-274 | 436 | | S0374: 1 and L0748: 1. | 7q22 | 126650, |
| | | | | | | | | 126650, |
| | | | | | | | | 154276, |
| | | | | | | | | 173360, |
| | | | | | | | | 173360, |
| | | | | | | | | 602136, |
| | | | | | | | | 602136, |
| | | | | | | | | 602136, |
| | | | | | | | | 602447 |
| HWLAU04 | 953433 | 203 | 3-290 | 437 | Thr-12 to Thr-24. | L0763: 1 and S0374: 1. | 5p15 | 123000, |
| | | | | | | | | 600857 |
| HWLAQ11 | 966207 | 204 | 77-214 | 438 | | L0805: 3, L0738: 1 | | |
| | | | | | | and S0374: 1. | | |
| HWLAL10 | 971666 | 205 | 2-184 | 439 | Asp-4 to Pro-9. | L0662: 1 and S0374: 1. | | |
| HWLAC70 | 775771 | 206 | 76-237 | 440 | | S0374: 1 and L0744: 1. | | |
| HWLAC29 | 690263 | 207 | 3-155 | 441 | | L0748: 3 and S0374: 1. | | |
| HWLAB74 | 765196 | 208 | 322-468 | 442 | Tyr-17 to Cys-22. | L0439: 5 and S0374: 1. | | |
| HRTAR64 | 575020 | 209 | 78-248 | 443 | Leu-40 to Arg-48. | L0742: 2 and T0008: 1. | | |
| HRTAR31 | 698417 | 210 | 176-322 | 444 | Lys-4 to Ile-10. | T0008: 1 and L0756: 1. | | |
| HRTAP73 | 560932 | 211 | 201-61 | 445 | Phe-31 to Thr-42. | T0008: 1 | | |
| | 867011 | 244 | 266-499 | 478 | Glu-29 to Thr-35. | | | |
| HRTAN72 | 766328 | 212 | 3-260 | 446 | Pro-25 to Val-30. | T0008: 1 | | |
| HRTAN70 | 524889 | 213 | 24-230 | 447 | | T0008: 1 | | |
| HRTAN65 | 753913 | 214 | 154-480 | 448 | Lys-62 to Lys-69. | T0008: 1, L0740: 1 | | |
| | | | | | | and L0745: 1. | | |
| HRTAN23 | 675124 | 215 | 101-208 | 449 | | T0008: 1 and L0748: 1. | | |
| HRTAE57 | 871385 | 216 | 165-401 | 450 | | L0748: 2, T0008: 1 | | |
| | | | | | | and L0754: 1. | | |
| HRTAD37 | 708782 | 217 | 220-423 | 451 | Cys-38 to Thr-46, | T0008: 1, L0471: 1, | | |
| | | | | | Lys-54 to Cys-61. | L0748: 1 and L0749: 1. | | |
| HOCNF65 | 859585 | 218 | 217-405 | 452 | Gly-12 to Thr-19. | L0438: 2, L0742: 2, | | |
| | | | | | | L0439: 2 and S0442: 1. | | |
| HGAMC08 | 958490 | 219 | 2-349 | 453 | Lys-13 to Tyr-23, | S0408: 1 and L0764: 1. | | |
| | | | | | Cys-42 to Thr-52, | | | |
| | | | | | Ser-71 to Pro-82, | | | |
| | | | | | Lys-105 to Asn-112. | | | |
| HCNSR78 | 773818 | 220 | 64-159 | 454 | | H0231: 1 and L0748: 1. | | |
| HCNSR32 | 699694 | 221 | 307-74 | 455 | Glu-9 to Glu-14, | L0754: 2 and H0231: 1. | | |
| | | | | | Thr-31 to Lys-39. | | | |
| HCNSE03 | 925492 | 222 | 528-713 | 456 | Arg-15 to Lys-20, | L0766: 2, H0231: 1, | | |
| | | | | | His-42 to Lys-53. | L0768: 1, L0794: 1 and | | |
| | | | | | | L0749: 1. | | |
| HCNDV73 | 764119 | 223 | 190-294 | 457 | | H0597: 1 and L0745: 1. | | |
| HCNDV41 | 862324 | 224 | 3-296 | 458 | | H0597: 1, L0369: 1 | | |
| | | | | | | and L0666: 1. | | |
| HCNDK37 | 706359 | 225 | 27-293 | 459 | Leu-1 to Leu-10, | H0597: 1 and L0747: 1. | | |
| | | | | | Ser-34 to Lys-39. | | | |
| HCNDF65 | 747499 | 226 | 169-369 | 460 | Glu-2 to Gln-9, | H0597: 1 and L0748: 1. | | |
| | | | | | Arg-46 to Arg-51. | | | |
| HCNDB86 | 785168 | 227 | 187-519 | 461 | Ile-4 to Pro-10. | H0597: 1 and L0748: 1. | | |
| HCNCX91 | 789556 | 228 | 46-189 | 462 | | H0597: 1 and L0748: 1. | | |
| HCNCX27 | 682479 | 229 | 322-483 | 463 | Asp-31 to Phe-36, | L0599: 2 and H0597: 1. | | |
| | | | | | Thr-42 to Glu-47. | | | |
| HCNCT03 | 923344 | 230 | 334-429 | 464 | | H0597: 1 and L0607: 1. | | |
| HCNCO59 | 738889 | 231 | 2-229 | 465 | Lys-60 to Val-65. | H0597: 1 and L0748: 1. | | |
| HCNCM79 | 892693 | 232 | 174-428 | 466 | His-25 to Leu-30, | H0597: 1 and L0764: 1. | | |
| | | | | | Lys-52 to Ser-59, | | | |
| | | | | | Pro-73 to Ser-79. | | | |
| HCNCF19 | 668043 | 233 | 244-465 | 467 | | L0777: 3, L0748: 2, | | |
| | | | | | | H0597: 1, L0776: 1, | | |
| | | | | | | L0749: 1 and L0753: 1. | | |
| HCNAZ20 | 670031 | 234 | 114-257 | 468 | Pro-6 to Phe-12. | L0517: 3, H0085: 1 | | |
| | | | | | | and L0748: 1. | | |
| HCNAY45 | 716992 | 235 | 56-382 | 469 | His-27 to Arg-32. | L0745: 2, H0085: 1, | | |
| | | | | | | L0367: 1, L0748: 1 and | | |
| | | | | | | L0439: 1. | | |
| HCNAT92 | 518899 | 236 | 1-243 | 470 | Asn-1 to Glu-8, | H0085: 1 | | |
| | | | | | Thr-14 to Ser-21, | | | |
| | | | | | Gln-38 to Phe-45, | | | |
| | | | | | Gly-48 to Glu-55. | | | |
| HCNAT67 | 508295 | 237 | 155-274 | 471 | | H0085: 1 | | |
| HCNAQ26 | 685199 | 238 | 408-548 | 472 | Thr-7 to Glu-13. | H0085: 1 and L0604: 1. | | |
| HCNAP29 | 855685 | 239 | 1-255 | 473 | His-14 to Gln-19. | H0085: 1 and L0766: 1. | | |
| HCNAL30 | 522672 | 240 | 3-83 | 474 | Arg-10 to Gln-20. | H0085: 1 | | |
| HCNAK11 | 967945 | 241 | 61-204 | 475 | Leu-26 to Asp-32, | H0085: 1, L0748: 1, | | |
| | | | | | Gly-37 to Ala-48. | L0749: 1 and L0758: 1. | | |
| HCNAA41 | 791545 | 242 | 183-572 | 476 | | H0085: 1 and L0749: 1. | | |

[0046] The first column in Table 1A provides a unique “Clone ID NO:Z” for a cDNA clone related to each contig sequence disclosed in Table 1A. This clone ID references the cDNA clone which contains at least the 5′ most sequence of the assembled contig, and at least a portion of SEQ ID NO:X was determined by directly sequencing the referenced clone. The reference clone may have more sequence than described in the sequence listing or the clone may have less. In the vast majority of cases, however, the clone is believed to encode a full-length polypeptide. In the case where a clone is not full-length, a full-length cDNA can be obtained by methods known in the art and/or as described elsewhere herein.

[0047] The second column in Table 1A provides a unique “Contig ID” identification for each contig sequence. The third column provides the “SEQ ID NO:X” identifier for each of the colon associated contig polynucleotide sequences disclosed in Table 1A. The fourth column, “ORF (From-To)”, provides the location (i.e., nucleotide position numbers) within the polynucleotide sequence “SEQ ID NO:X” that delineate the preferred open reading frame (ORF) shown in the sequence listing and referenced in Table 1A, column 5, as SEQ ID NO:Y. Where the nucleotide position number “To” is lower than the nucleotide position number “From”, the preferred ORF is the reverse complement of the referenced polynucleotide sequence.

[0048] The fifth column in Table 1A provides the corresponding SEQ ID NO:Y for the polypeptide sequence encoded by the preferred ORF delineated in column 4. In one embodiment, the invention provides an amino acid sequence comprising, or alternatively consisting of, a polypeptide encoded by the portion of SEQ ID NO:X delineated by “ORF (From-To)”. Also provided are polynucleotides encoding such amino acid sequences and the complementary strand thereto.

[0049] Column 6 in Table 1A lists residues comprising epitopes contained in the polypeptides encoded by the preferred ORF (SEQ ID NO:Y), as predicted using the algorithm of Jameson and Wolf, (1988) Comp. Appl. Biosci. 4:181-186. The Jameson-Wolf antigenic analysis was performed using the computer program PROTEAN (Version 3.11 for the Power Maclntosh, DNASTAR, Inc., 1228 South Park Street Madison, Wis.). In specific embodiments, polypeptides of the invention comprise, or alternatively consist of, at least one, two, three, four, five or more of the predicted epitopes as described in Table 1A. It will be appreciated that depending on the analytical criteria used to predict antigenic determinants, the exact address of the determinant may vary slightly.

[0050] Column 7 in Table 1A provides an expression profile and library code: count for each of the contig sequences (SEQ ID NO:X) disclosed in Table 1A, which can routinely be combined with the information provided in Table 4 and used to determine the normal or diseased tissues, cells, and/or cell line libraries which predominantly express the polynucleotides of the invention. The first number in column 7 (preceding the colon), represents the tissue/cell source identifier code corresponding to the code and description provided in Table 4. For those identifier codes in which the first two letters are not “AR”, the second number in column 7 (following the colon) represents the number of times a sequence corresponding to the reference polynucleotide sequence was identified in the tissue/cell source. Those tissue/cell source identifier codes in which the first two letters are “AR” designate information generated using DNA array technology. Utilizing this technology, cDNAs were amplified by PCR and then transferred, in duplicate, onto the array. Gene expression was assayed through hybridization of first strand cDNA probes to the DNA array. cDNA probes were generated from total RNA extracted from a variety of different tissues and cell lines. Probe synthesis was performed in the presence of ³³P dCTP, using oligo(dT) to prime reverse transcription. After hybridization, high stringency washing conditions were employed to remove non-specific hybrids from the array. The remaining signal, emanating from each gene target, was measured using a Phosphorimager. Gene expression was reported as Phosphor Stimulating Luminescence (PSL) which reflects the level of phosphor signal generated from the probe hybridized to each of the gene targets represented on the array. A local background signal subtraction was performed before the total signal generated from each array was used to normalize gene expression between the different hybridizations. The value presented after “[array code]:” represents the mean of the duplicate values, following background subtraction and probe normalization. One of skill in the art could routinely use this information to identify normal and/or diseased tissue(s) which show a predominant expression pattern of the corresponding polynucleotide of the invention or to identify polynucleotides which show predominant and/or specific tissue and/or cell expression. The sequences disclosed herein have been determined to be predominantly expressed in colon tissues, including normal and diseased colon tissues (See Table 1A, column 7 and Table 4).

[0051] Column 8 in Table 1A provides a chromosomal map location for certain polynucleotides of the invention. Chromosomal location was determined by finding exact matches to EST and cDNA sequences contained in the NCBI (National Center for Biotechnology Information) UniGene database. Each sequence in the UniGene database is assigned to a “cluster”; all of the ESTs, cDNAs, and STSs in a cluster are believed to be derived from a single gene. Chromosomal mapping data is often available for one or more sequence(s) in a UniGene cluster; this data (if consistent) is then applied to the cluster as a whole. Thus, it is possible to infer the chromosomal location of a new polynucleotide sequence by determining its identity with a mapped UniGene cluster.

[0052] A modified version of the computer program BLASTN (Altshul et al., J. Mol. Biol. 215:403-410 (1990), and Gish et al., Nat. Genet. 3:266-272 (1993)) was used to search the UniGene database for EST or cDNA sequences that contain exact or near-exact matches to a polynucleotide sequence of the invention (the ‘Query’). A sequence from the UniGene database (the ‘Subject’) was said to be an exact match if it contained a segment of 50 nucleotides in length such that 48 of those nucleotides were in the same order as found in the Query sequence. If all of the matches that met this criteria were in the same UniGene cluster, and mapping data was available for this cluster, it is indicated in Table 1A under the heading “Cytologic Band”. Where a cluster had been further localized to a distinct cytologic band, that band is disclosed; where no banding information was available, but the gene had been localized to a single chromosome, the chromosome is disclosed.

[0053] Once a presumptive chromosomal location was determined for a polynucleotide of the invention, an associated disease locus was identified by comparison with a database of diseases which have been experimentally associated with genetic loci. The database used was the Morbid Map, derived from OMIM™ (supra). If the putative chromosomal location of a polynucleotide of the invention (Query sequence) was associated with a disease in the Morbid Map database, an OMIM reference identification number was noted in column 9, Table 1A, labeled “OMIM Disease Reference(s)”. Table 5 is a key to the OMIM reference identification numbers (column 1), and provides a description of the associated disease in Column 2.

TABLE 1B

| Clone ID NO: Z | SEQ ID NO: X | CONTIG ID: | BAC ID: A | SEQ ID NO: B | EXON From-To |
|---|---|---|---|---|---|
| HCNAC10 | 11 | 968738 | AL353678 | 479 | 1-154 |
| | | | | | 1195-1580 |
| | | | | | 1587-2168 |
| | | | | | 3515-3965 |
| | | | | | 5140-5394 |
| | | | | | 7947-8128 |
| | | | | | 8641-8755 |
| | | | | | 9183-9557 |
| HCNAC10 | 11 | 968738 | AC009657 | 480 | 1-275 |
| HCNAC10 | 11 | 968738 | AL137849 | 481 | 1-154 |
| | | | | | 1195-1580 |
| | | | | | 1587-2168 |
| | | | | | 3514-3964 |
| | | | | | 5139-5408 |
| | | | | | 7946-8127 |
| | | | | | 8640-8754 |
| | | | | | 9182-9556 |
| HCNAC10 | 11 | 968738 | AC009657 | 482 | 1-182 |
| | | | | | 696-774 |
| HCNAG07 | 12 | 954493 | AL359254 | 483 | 1-332 |
| HCNAG07 | 12 | 954493 | AL359254 | 484 | 1-399 |
| HCNAG07 | 12 | 954493 | AL359254 | 485 | 1-153 |
| HCNAK56 | 13 | 832249 | AC023479 | 486 | 1-256 |
| HCNAK56 | 13 | 832249 | AL136231 | 487 | 1-256 |
| HCNAK56 | 13 | 832249 | AC023479 | 488 | 1-258 |
| HCNAK56 | 13 | 832249 | AL136231 | 489 | 1-258 |
| HCNAK56 | 13 | 832249 | AL136231 | 490 | 1-644 |
| | | | | | 709-2929 |
| | | | | | 5175-6204 |
| | | | | | 6371-6565 |
| | | | | | 9803-10051 |
| | | | | | 10520-10645 |
| | | | | | 11191-11216 |
| HCNAL66 | 14 | 832247 | AC011747 | 491 | 1-755 |
| HCNAL66 | 14 | 832247 | AC021669 | 492 | 1-692 |
| HCNAL66 | 14 | 832247 | AC011747 | 493 | 1-206 |
| | | | | | 266-796 |
| | | | | | 6613-6752 |
| | | | | | 7056-7340 |
| HCNAL66 | 14 | 832247 | AC011747 | 494 | 1-2511 |
| HCNAL66 | 14 | 832247 | AC021669 | 495 | 1-206 |
| | | | | | 266-796 |
| | | | | | 6613-6752 |
| | | | | | 7056-7340 |
| HCNAN69 | 15 | 655816 | AC068589 | 496 | 1-318 |
| HCNAN69 | 15 | 655816 | AC009675 | 497 | 1-318 |
| HCNAN69 | 15 | 655816 | AC009675 | 498 | 1-520 |
| HCNAO20 | 16 | 832251 | AC073219 | 499 | 1-123 |
| | | | | | 288-775 |
| | | | | | 1530-1839 |
| | | | | | 1877-2491 |
| | | | | | 2744-2824 |
| | | | | | 3483-3563 |
| | | | | | 3679-3881 |
| HCNAO20 | 16 | 832251 | AC073219 | 500 | 1-169 |
| HCNAO20 | 16 | 832251 | AC073219 | 501 | 1-552 |
| | | | | | 560-881 |
| HCNAR21 | 17 | 948746 | AC073645 | 502 | 1-421 |
| HCNAR21 | 17 | 948746 | AP002392 | 503 | 1-421 |
| HCNAR21 | 17 | 948746 | AC006595 | 504 | 1-421 |
| HCNAR21 | 17 | 948746 | AP002392 | 505 | 1-187 |
| HCNAR21 | 17 | 948746 | AC006595 | 506 | 1-187 |
| HCNAR21 | 17 | 948746 | AP002392 | 507 | 1-200 |
| HCNAR21 | 17 | 948746 | AC006595 | 508 | 1-200 |
| HCNCH64 | 20 | 922009 | AL161457 | 509 | 1-279 |
| HCNCH64 | 20 | 922009 | AC025021 | 510 | 1-279 |
| HCNCH64 | 20 | 922009 | AL161457 | 511 | 1-1531 |
| HCNCN84 | 21 | 766990 | AC074373 | 512 | 1-270 |
| HCNCN84 | 21 | 766990 | AC024952 | 513 | 1-270 |
| HCNCN84 | 21 | 766990 | AC025594 | 514 | 1-269 |
| HCNCQ79 | 22 | 832242 | AC022532 | 515 | 1-523 |
| HCNCQ79 | 22 | 832242 | AC022532 | 516 | 1-67 |
| | | | | | 122-447 |
| | | | | | 610-1431 |
| | | | | | 1433-1462 |
| HCNCU02 | 23 | 918993 | AC005971 | 517 | 1-1487 |
| | | | | | 6909-7046 |
| | | | | | 9097-10457 |
| | | | | | 10648-11165 |
| | | | | | 12020-12240 |
| | | | | | 12309-12707 |
| | | | | | 12727-13046 |
| | | | | | 13857-14385 |
| | | | | | 17076-17407 |
| | | | | | 17443-17739 |
| | | | | | 20344-20631 |
| | | | | | 25816-26241 |
| | | | | | 26972-27033 |
| | | | | | 27895-28012 |
| | | | | | 28416-28841 |
| | | | | | 30843-31004 |
| | | | | | 31065-33416 |
| | | | | | 33702-33996 |
| | | | | | 34031-34209 |
| | | | | | 34516-35103 |
| | | | | | 36326-36709 |
| HCNCU02 | 23 | 918993 | AL356460 | 518 | 1-1488 |
| | | | | | 1588-1716 |
| | | | | | 2931-3073 |
| | | | | | 6554-6658 |
| | | | | | 9098-10459 |
| | | | | | 10650-11167 |
| | | | | | 12010-12230 |
| | | | | | 12299-12697 |
| | | | | | 12717-13036 |
| | | | | | 13370-13822 |
| | | | | | 13909-14224 |
| | | | | | 14268-14695 |
| | | | | | 17385-17715 |
| | | | | | 17812-18047 |
| | | | | | 20669-20769 |
| | | | | | 23441-23581 |
| | | | | | 26125-26550 |
| | | | | | 27281-27342 |
| | | | | | 28204-28321 |
| | | | | | 28726-29150 |
| | | | | | 31153-31314 |
| | | | | | 31375-33728 |
| | | | | | 34014-34308 |
| | | | | | 34343-34521 |
| | | | | | 34662-35415 |
| | | | | | 36638-36933 |
| HCNCU02 | 23 | 918993 | AC005971 | 519 | 1-89 |
| HCNCU02 | 23 | 918993 | AL356460 | 520 | 1-383 |
| HCNCY39 | 25 | 960373 | AC004874 | 521 | 1-291 |
| HCNCY39 | 25 | 960373 | AC004874 | 522 | 1-329 |
| HCNDB53 | 26 | 832225 | AL139814 | 523 | 1-350 |
| HCNDB53 | 26 | 832225 | AL139814 | 524 | 1-207 |
| | | | | | 220-316 |
| HCNDD83 | 27 | 832230 | AC051618 | 525 | 1-504 |
| HCNDD83 | 27 | 832230 | AC067748 | 526 | 1-252 |
| HCNDD83 | 27 | 832230 | AC022537 | 527 | 1-149 |
| | | | | | 377-515 |
| | | | | | 640-847 |
| | | | | | 1110-1613 |
| | | | | | 4209-8923 |
| HCNDD83 | 27 | 832230 | AC012049 | 528 | 1-86 |
| | | | | | 211-418 |
| | | | | | 681-1184 |
| | | | | | 3786-8494 |
| HCNDD83 | 27 | 832230 | AC067748 | 529 | 1-1003 |
| HCNDD83 | 27 | 832230 | AC051618 | 530 | 1-208 |
| HCNDD83 | 27 | 832230 | AC022537 | 531 | 1-338 |
| HCNDD83 | 27 | 832230 | AC012049 | 532 | 1-338 |
| HCNDF20 | 28 | 669111 | AL365258 | 533 | 1-264 |
| HCNDF20 | 28 | 669111 | AL138777 | 534 | 1-264 |
| HCNDF20 | 28 | 669111 | AL365258 | 535 | 1-317 |
| HCNDF20 | 28 | 669111 | AL138777 | 536 | 1-243 |
| HCNDH18 | 30 | 832215 | AC007956 | 537 | 1-283 |
| HCNDH18 | 30 | 832215 | AC007956 | 538 | 1-374 |
| HCNDI01 | 31 | 832213 | AC068150 | 539 | 1-902 |
| HCNDI01 | 31 | 832213 | AC068150 | 540 | 1-577 |
| HCNDL91 | 32 | 832209 | AC009125 | 541 | 1-211 |
| HCNDL91 | 32 | 832209 | AC009125 | 542 | 1-563 |
| HCNDQ50 | 34 | 723976 | AC019047 | 543 | 1-386 |
| HCNDQ50 | 34 | 723976 | AC019047 | 544 | 1-159 |
| HCNDQ50 | 34 | 723976 | AC019047 | 545 | 1-391 |
| HCNDV42 | 35 | 927262 | AL390036 | 546 | 1-359 |
| HCNSM15 | 36 | 914484 | AC009692 | 547 | 1-153 |
| HCNSP37 | 37 | 655829 | AL121874 | 548 | 1-265 |
| HCNSP37 | 37 | 655829 | AL121874 | 549 | 1-280 |
| HCNUA84 | 40 | 522523 | AC023767 | 550 | 1-434 |
| HCNUA84 | 40 | 522523 | AL035693 | 551 | 1-434 |
| HCNUA84 | 40 | 522523 | AC023767 | 552 | 1-655 |
| HCNUA84 | 40 | 522523 | AL035693 | 553 | 1-655 |
| HWLAL74 | 42 | 761974 | AL161795 | 554 | 1-313 |
| HWLAL74 | 42 | 761974 | AC010986 | 555 | 1-313 |
| HWLAL74 | 42 | 761974 | AL161795 | 556 | 1-148 |
| HWLAL74 | 42 | 761974 | AC010986 | 557 | 1-148 |
| HWLED58 | 46 | 830330 | AC022097 | 558 | 1-500 |
| HWLED58 | 46 | 830330 | AC009229 | 559 | 1-500 |
| HWLEF86 | 47 | 785193 | AL355336 | 560 | 1-158 |
| HWLEF86 | 47 | 785193 | AC027364 | 561 | 1-158 |
| HWLEF86 | 47 | 785193 | AL355336 | 562 | 1-308 |
| HWLEF86 | 47 | 785193 | AC027364 | 563 | 1-308 |
| HWLEF86 | 47 | 785193 | AL355336 | 564 | 1-573 |
| HWLEF86 | 47 | 785193 | AC027364 | 565 | 1-559 |
| HWLEH06 | 48 | 934649 | AC022468 | 566 | 1-549 |
| HWLEK39 | 51 | 918545 | AC026041 | 567 | 1-602 |
| HWLEK39 | 51 | 918545 | AC025342 | 568 | 1-594 |
| HWLEK39 | 51 | 918545 | AL358177 | 569 | 1-594 |
| HWLEK39 | 51 | 918545 | AC025342 | 570 | 1-247 |
| | | | | | 526-1300 |
| HWLEK39 | 51 | 918545 | AL358177 | 571 | 1-247 |
| | | | | | 526-1300 |
| HWLEK39 | 51 | 918545 | AC026041 | 572 | 1-247 |
| | | | | | 526-1300 |
| HWLEN20 | 53 | 963418 | AL355388 | 573 | 1-634 |
| HWLEN20 | 53 | 963418 | AL356734 | 574 | 1-634 |
| HWLEN20 | 53 | 963418 | AL355388 | 575 | 1-138 |
| HWLEN20 | 53 | 963418 | AL356734 | 576 | 1-51 |
| | | | | | 55-268 |
| HWLEN20 | 53 | 963418 | AL355388 | 577 | 1-114 |
| HWLEN20 | 53 | 963418 | AL356734 | 578 | 1-138 |
| HWLEO59 | 54 | 974078 | AC004590 | 579 | 1-227 |
| | | | | | 237-962 |
| | | | | | 1635-2011 |
| | | | | | 2227-2464 |
| | | | | | 2594-2702 |
| | | | | | 3058-3363 |
| | | | | | 4981-5183 |
| | | | | | 6857-6945 |
| | | | | | 7504-7921 |
| | | | | | 7967-8221 |
| | | | | | 8359-9282 |
| | | | | | 9552-9683 |
| | | | | | 10817-11045 |
| | | | | | 11060-11319 |
| HWLEO59 | 54 | 974078 | AC004590 | 580 | 1-569 |
| HWLEO59 | 54 | 974078 | AC004590 | 581 | 1-496 |
| | | | | | 1180-1555 |
| HWLEP95 | 55 | 751199 | AC023287 | 582 | 1-473 |
| HWLEP95 | 55 | 751199 | AC012118 | 583 | 1-473 |
| HWLEP95 | 55 | 751199 | AC023287 | 584 | 1-250 |
| | | | | | 1060-1374 |
| HWLEP95 | 55 | 751199 | AC012118 | 585 | 1-54 |
| | | | | | 109-250 |
| | | | | | 1061-1374 |
| | | | | | 2663-2767 |
| | | | | | 2820-3116 |
| HWLEQ36 | 56 | 966250 | AC011405 | 586 | 1-881 |
| | | | | | 986-1165 |
| | | | | | 3985-5285 |
| | | | | | 5335-5688 |
| | | | | | 6204-6681 |
| | | | | | 8287-9016 |
| | | | | | 9026-10953 |
| HWLEQ36 | 56 | 966250 | AC011405 | 587 | 1-188 |
| HWLEQ36 | 56 | 966250 | AC011405 | 588 | 1-559 |
| HWLER88 | 58 | 915168 | AC026593 | 589 | 1-324 |
| HWLER88 | 58 | 915168 | AL365508 | 590 | 1-323 |
| HWLER88 | 58 | 915168 | AL365508 | 591 | 1-164 |
| HWLER88 | 58 | 915168 | AC026593 | 592 | 1-296 |
| HWLFB08 | 59 | 849136 | AL133243 | 593 | 1-607 |
| HWLFB08 | 59 | 849136 | AL133245 | 594 | 1-607 |
| HWLFB08 | 59 | 849136 | AL133243 | 595 | 1-457 |
| HWLFB08 | 59 | 849136 | AL133245 | 596 | 1-457 |
| HWLFC80 | 60 | 830279 | AL360224 | 597 | 1-571 |
| HWLFF40 | 62 | 830287 | AC012114 | 598 | 1-314 |
| HWLFF40 | 62 | 830287 | AC009135 | 599 | 1-314 |
| HWLFF40 | 62 | 830287 | AC005751 | 600 | 1-314 |
| HWLFF40 | 62 | 830287 | AC012114 | 601 | 1-128 |
| HWLFF40 | 62 | 830287 | AC012114 | 602 | 1-192 |
| HWLFF40 | 62 | 830287 | AC005751 | 603 | 1-224 |
| | | | | | 236-273 |
| HWLFF40 | 62 | 830287 | AC005751 | 604 | 1-115 |
| HWLFF62 | 63 | 915155 | AC073957 | 605 | 1-449 |
| HWLFJ51 | 65 | 853602 | AP001374 | 606 | 1-496 |
| HWLFO70 | 67 | 756554 | AC019114 | 607 | 1-423 |
| HWLFO70 | 67 | 756554 | AC021618 | 608 | 1-423 |
| HWLFO70 | 67 | 756554 | AC005595 | 609 | 1-421 |
| HWLFO70 | 67 | 756554 | AC021618 | 610 | 1-396 |
| HWLFO82 | 68 | 779461 | AC025514 | 611 | 1-530 |
| HWLFO82 | 68 | 779461 | AC025514 | 612 | 1-601 |
| HWLFO92 | 69 | 791052 | AC017058 | 613 | 1-565 |
| HWLFO92 | 69 | 791052 | AC021212 | 614 | 1-565 |
| HWLFP37 | 70 | 708985 | AL355385 | 615 | 1-146 |
| | | | | | 497-980 |
| | | | | | 1207-1380 |
| | | | | | 1451-1669 |
| | | | | | 2274-2583 |
| | | | | | 4825-5054 |
| | | | | | 5496-5538 |
| | | | | | 6378-6666 |
| | | | | | 8013-8684 |
| | | | | | 9737-9905 |
| | | | | | 11525-11665 |
| | | | | | 11776-11892 |
| | | | | | 11966-12075 |
| | | | | | 12114-12632 |
| | | | | | 13486-13743 |
| HWLFP37 | 70 | 708985 | AC022022 | 616 | 1-59 |
| | | | | | 460-1027 |
| HWLFP37 | 70 | 708985 | AC016197 | 617 | 1-59 |
| | | | | | 460-1027 |
| HWLFP37 | 70 | 708985 | AL355385 | 618 | 1-257 |
| | | | | | 1083-1352 |
| HWLFP37 | 70 | 708985 | AC022022 | 619 | 1-216 |
| HWLFP37 | 70 | 708985 | AC022022 | 620 | 1-599 |
| HWLFP37 | 70 | 708985 | AC016197 | 621 | 1-216 |
| HWLFP37 | 70 | 708985 | AC016197 | 622 | 1-599 |
| HWLFQ48 | 72 | 721154 | AC073612 | 623 | 1-440 |
| | | | | | 3319-3739 |
| | | | | | 4558-4663 |
| | | | | | 4790-5182 |
| | | | | | 6025-6111 |
| HWLFQ48 | 72 | 721154 | AC025264 | 624 | 1-421 |
| HWLFQ48 | 72 | 721154 | AC011601 | 625 | 1-440 |
| | | | | | 3319-3739 |
| | | | | | 4558-4663 |
| | | | | | 4790-5180 |
| | | | | | 6022-6108 |
| HWLFQ48 | 72 | 721154 | AC073612 | 626 | 1-534 |
| HWLFQ48 | 72 | 721154 | AC011601 | 627 | 1-137 |
| | | | | | 753-876 |
| | | | | | 1276-1426 |
| | | | | | 2139-2316 |
| | | | | | 2563-2861 |
| | | | | | 3065-3612 |
| | | | | | 3690-3800 |
| | | | | | 4624-4758 |
| | | | | | 4858-4980 |
| | | | | | 5337-5705 |
| | | | | | 5867-5982 |
| | | | | | 6557-6675 |
| | | | | | 7659-7842 |
| | | | | | 9146-9333 |
| | | | | | 10836-11491 |
| | | | | | 11814-12235 |
| | | | | | 12409-12584 |
| | | | | | 12635-13130 |
| | | | | | 13274-13608 |
| | | | | | 13789-14222 |
| | | | | | 15257-15381 |
| | | | | | 15466-15667 |
| | | | | | 16183-16277 |
| | | | | | 20273-20385 |
| | | | | | 20653-20757 |
| | | | | | 20891-21842 |
| | | | | | 22155-22259 |
| | | | | | 22885-24020 |
| | | | | | 24023-26112 |
| HWLFQ48 | 72 | 721154 | AC011601 | 628 | 1-534 |
| HWLFS01 | 73 | 915531 | AL354743 | 629 | 1-473 |
| HWLFS01 | 73 | 915531 | AC011075 | 630 | 1-473 |
| HWLFS01 | 73 | 915531 | AC010082 | 631 | 1-473 |
| HWLFS01 | 73 | 915531 | AC011075 | 632 | 1-190 |
| | | | | | 245-410 |
| HWLFS01 | 73 | 915531 | AC010082 | 633 | 1-190 |
| | | | | | 245-410 |
| HWLFS86 | 74 | 830246 | AC009986 | 634 | 1-1426 |
| HWLFS86 | 74 | 830246 | AC009986 | 635 | 1-640 |
| HWLFV61 | 75 | 922924 | AC022165 | 636 | 1-365 |
| HWLFV61 | 75 | 922924 | AC010732 | 637 | 1-366 |
| HWLFV61 | 75 | 922924 | AC010732 | 638 | 1-149 |
| HWLFV61 | 75 | 922924 | AC010732 | 639 | 1-114 |
| | | | | | 204-269 |
| | | | | | 760-836 |
| | | | | | 3302-3619 |
| HWLGL36 | 77 | 806724 | AC044833 | 640 | 1-451 |
| HWLGP10 | 78 | 883139 | AC021094 | 641 | 1-2212 |
| HWLGP10 | 78 | 883139 | AL035367 | 642 | 1-4923 |
| | | | | | 6084-6317 |
| | | | | | 7224-7714 |
| | | | | | 8697-8822 |
| | | | | | 9493-9616 |
| | | | | | 11091-11224 |
| | | | | | 11545-11631 |
| | | | | | 11683-11804 |
| | | | | | 13117-13798 |
| | | | | | 14088-14611 |
| | | | | | 15262-15364 |
| | | | | | 15574-15794 |
| | | | | | 16263-16892 |
| HWLGP10 | 78 | 883139 | AC021094 | 643 | 1-119 |
| HWLGP10 | 78 | 883139 | AL035367 | 644 | 1-115 |
| HWLGP10 | 78 | 883139 | AL035367 | 645 | 1-119 |
| HWLGR72 | 80 | 958284 | AC021558 | 646 | 1-841 |
| HWLGR72 | 80 | 958284 | AC021558 | 647 | 1-129 |
| HWLGT12 | 81 | 966044 | AC005103 | 648 | 1-770 |
| HWLGT12 | 81 | 966044 | AF047825 | 649 | 1-770 |
| HWLGT12 | 81 | 966044 | AC005103 | 650 | 1-940 |
| HWLGT12 | 81 | 966044 | AF047825 | 651 | 1-940 |
| HWLGX56 | 82 | 830329 | AC048339 | 652 | 1-624 |
| HWLGX56 | 82 | 830329 | AC026367 | 653 | 1-624 |
| HWLGX56 | 82 | 830329 | AC027063 | 654 | 1-624 |
| HWLGX56 | 82 | 830329 | AC048339 | 655 | 1-307 |
| HWLGX56 | 82 | 830329 | AC026367 | 656 | 1-86 |
| HWLGX56 | 82 | 830329 | AC027063 | 657 | 1-86 |
| HWLGX56 | 82 | 830329 | AC048339 | 658 | 1-86 |
| HWLGX56 | 82 | 830329 | AC026367 | 659 | 1-307 |
| HWLGX56 | 82 | 830329 | AC027063 | 660 | 1-307 |
| HWLHP05 | 84 | 931087 | AC023254 | 661 | 1-146 |
| HWLHP05 | 84 | 931087 | AC025755 | 662 | 1-473 |
| HWLHP05 | 84 | 931087 | AC015454 | 663 | 1-5585 |
| | | | | | 5602-5958 |
| | | | | | 6161-6284 |
| | | | | | 6386-7263 |
| | | | | | 11426-11525 |
| | | | | | 14534-15005 |
| | | | | | 16779-16892 |
| | | | | | 26655-26800 |
| | | | | | 27874-28473 |
| | | | | | 28486-33492 |
| HWLHP05 | 84 | 931087 | AC025755 | 664 | 1-114 |
| HWLHR93 | 85 | 952387 | AP000597 | 665 | 1-391 |
| HWLHR93 | 85 | 952387 | AP000724 | 666 | 1-391 |
| HWLHR93 | 85 | 952387 | AP000724 | 667 | 1-488 |
| HWLHR93 | 85 | 952387 | AP000724 | 668 | 1-249 |
| HWLHT92 | 87 | 830322 | AC011191 | 669 | 1-543 |
| HWLHT92 | 87 | 830322 | AC011191 | 670 | 1-450 |
| HWLIF03 | 89 | 830233 | AC025361 | 671 | 1-657 |
| HWLIF03 | 89 | 830233 | AC067739 | 672 | 1-657 |
| HWLIF03 | 89 | 830233 | AC025154 | 673 | 1-657 |
| HWLIF03 | 89 | 830233 | AC067739 | 674 | 1-416 |
| HWLIL65 | 90 | 747440 | AL139150 | 675 | 1-454 |
| | | | | | 888-1013 |
| | | | | | 3847-4987 |
| HWLIL65 | 90 | 747440 | AL139150 | 676 | 1-668 |
| HWLIO73 | 92 | 761965 | AC021972 | 677 | 1-629 |
| HWLIW68 | 94 | 925892 | AL138771 | 678 | 1-483 |
| HWLJB04 | 95 | 926066 | AC010226 | 679 | 1-575 |
| | | | | | 642-1128 |
| HWLJB04 | 95 | 926066 | AC010472 | 680 | 1-1277 |
| | | | | | 1339-1830 |
| HWLJB04 | 95 | 926066 | AC008628 | 681 | 1-1934 |
| HWLJB04 | 95 | 926066 | AC022114 | 682 | 1-576 |
| HWLJB04 | 95 | 926066 | AC010226 | 683 | 1-1431 |
| HWLJB04 | 95 | 926066 | AC010472 | 684 | 1-243 |
| HWLJB04 | 95 | 926066 | AC008628 | 685 | 1-157 |
| HWLJE89 | 97 | 928258 | AC022485 | 686 | 1-591 |
| HWLJE89 | 97 | 928258 | AC024026 | 687 | 1-591 |
| HWLJL14 | 99 | 832205 | AP000450 | 688 | 1-486 |
| HWLJL14 | 99 | 832205 | AC067812 | 689 | 1-486 |
| HWLJL14 | 99 | 832205 | AC020549 | 690 | 1-486 |
| HWLJL14 | 99 | 832205 | AP000450 | 691 | 1-489 |
| HWLJL14 | 99 | 832205 | AC067812 | 692 | 1-489 |
| HWLJL14 | 99 | 832205 | AC020549 | 693 | 1-489 |
| HWLJL46 | 100 | 830226 | AC068669 | 694 | 1-759 |
| | | | | | 771-1520 |
| HWLJL46 | 100 | 830226 | AC068669 | 695 | 1-116 |
| HWLJZ30 | 104 | 925870 | AC006483 | 696 | 1-690 |
| HWLJZ30 | 104 | 925870 | AC006483 | 697 | 1-125 |
| HWLJZ30 | 104 | 925870 | AC006483 | 698 | 1-311 |
| HWLKC87 | 105 | 956205 | AC019173 | 699 | 1-549 |
| HWLKF70 | 106 | 830237 | AC006087 | 700 | 1-244 |
| | | | | | 3149-3246 |
| | | | | | 3955-4448 |
| | | | | | 5009-6576 |
| | | | | | 9703-9813 |
| | | | | | 13512-13970 |
| | | | | | 14710-14978 |
| | | | | | 15679-15783 |
| HWLKF70 | 106 | 830237 | AC006087 | 701 | 1-263 |
| HWLKL17 | 107 | 928720 | AC069547 | 702 | 1-485 |
| HWLKL17 | 107 | 928720 | AL117341 | 703 | 1-486 |
| HWLKL17 | 107 | 928720 | AC069547 | 704 | 1-120 |
| HWLKL17 | 107 | 928720 | AL117341 | 705 | 1-120 |
| HWLKV34 | 109 | 957615 | AC009316 | 706 | 1-657 |
| HWLKV91 | 110 | 830214 | AL121574 | 707 | 1-658 |
| HWLKV91 | 110 | 830214 | AL121574 | 708 | 1-422 |
| HWLKW04 | 111 | 969141 | AC016327 | 709 | 1-165 |
| HWLKW04 | 111 | 969141 | AC016327 | 710 | 1-195 |
| HWLKW09 | 112 | 951716 | AC021865 | 711 | 1-802 |
| HWLKW09 | 112 | 951716 | AC021865 | 712 | 1-1232 |
| HWLKW09 | 112 | 951716 | AC021865 | 713 | 1-117 |
| HWLLH25 | 116 | 933479 | AC024243 | 714 | 1-447 |
| HWLLH25 | 116 | 933479 | AC024243 | 715 | 1-533 |
| HWLLS11 | 117 | 965899 | AL138828 | 716 | 1-451 |
| | | | | | 1248-1428 |
| | | | | | 1461-1796 |
| | | | | | 2415-2561 |
| | | | | | 2842-3543 |
| | | | | | 8112-8326 |
| HWLLS11 | 117 | 965899 | AL121713 | 717 | 1-1090 |
| | | | | | 1743-2070 |
| | | | | | 2080-2747 |
| | | | | | 2886-3059 |
| | | | | | 4283-4583 |
| | | | | | 4822-5200 |
| | | | | | 5401-5509 |
| | | | | | 6307-6596 |
| | | | | | 6737-7264 |
| | | | | | 7809-8161 |
| | | | | | 8976-9474 |
| | | | | | 10248-10428 |
| | | | | | 10461-10796 |
| | | | | | 11415-11561 |
| | | | | | 11842-12543 |
| | | | | | 17112-17326 |
| | | | | | 17473-21732 |
| HWLLS11 | 117 | 965899 | AL138828 | 718 | 1-349 |
| HWLLS11 | 117 | 965899 | AL121713 | 719 | 1-27 |
| | | | | | 2735-2850 |
| | | | | | 3837-3882 |
| HWLLT02 | 118 | 918419 | AL031652 | 720 | 1-634 |
| HWLLT02 | 118 | 918419 | AL031652 | 721 | 1-247 |
| HWLLX12 | 120 | 969681 | AC002379 | 722 | 1-113 |
| | | | | | 2270-2690 |
| | | | | | 2933-3032 |
| HWLLX12 | 120 | 969681 | AC002379 | 723 | 1-213 |
| HWLPC29 | 121 | 965058 | AL049713 | 724 | 1-83 |
| | | | | | 2032-2121 |
| | | | | | 2704-3023 |
| | | | | | 4332-4487 |
| | | | | | 5178-5340 |
| | | | | | 5639-6325 |
| | | | | | 7269-8537 |
| HWLPC29 | 121 | 965058 | AL049713 | 725 | 1-2322 |
| HWLPG05 | 122 | 930991 | AP000813 | 726 | 1-424 |
| HWLPG05 | 122 | 930991 | AP001001 | 727 | 1-864 |
| HWLPG05 | 122 | 930991 | AP000813 | 728 | 1-1220 |
| HWLPG05 | 122 | 930991 | AP001001 | 729 | 1-247 |
| | | | | | 718-1002 |
| | | | | | 4452-5671 |
| HWLPG05 | 122 | 930991 | AP001001 | 730 | 1-438 |
| HWMAD05 | 123 | 931076 | AC060763 | 731 | 1-129 |
| HWMEL48 | 125 | 830256 | AC004777 | 732 | 1-1098 |
| HWMEL48 | 125 | 830256 | AC004777 | 733 | 1-177 |
| HWMEL48 | 125 | 830256 | AC004777 | 734 | 1-1079 |
| HWMEU56 | 126 | 922375 | AC027722 | 735 | 1-467 |
| HWMFG10 | 128 | 963406 | AL355134 | 736 | 1-592 |
| HWMFG10 | 128 | 963406 | AL353644 | 737 | 1-592 |
| HWMFG10 | 128 | 963406 | AL355134 | 738 | 1-402 |
| HWMFG10 | 128 | 963406 | AL353644 | 739 | 1-150 |
| HWMFG10 | 128 | 963406 | AL355134 | 740 | 1-150 |
| HWMFG32 | 129 | 883180 | AC022107 | 741 | 1-276 |
| | | | | | 456-663 |
| | | | | | 1014-1460 |
| | | | | | 1961-2263 |
| | | | | | 2561-2691 |
| | | | | | 3029-3584 |
| | | | | | 3903-4218 |
| | | | | | 5757-5961 |
| | | | | | 7262-7613 |
| | | | | | 7968-8207 |
| HWMFG32 | 129 | 883180 | AC022107 | 742 | 1-105 |
| HWMFH23 | 130 | 849129 | AL096855 | 743 | 1-437 |
| HWMFH23 | 130 | 849129 | AL096855 | 744 | 1-102 |
| HWMFH23 | 130 | 849129 | AL096855 | 745 | 1-127 |
| HWMFQ90 | 131 | 928646 | AL138996 | 746 | 1-376 |
| HWMFQ90 | 131 | 928646 | AL138996 | 747 | 1-915 |
| HWMHG06 | 134 | 933534 | AC055123 | 748 | 1-579 |
| HWMHG06 | 134 | 933534 | AC055123 | 749 | 1-40 |
| | | | | | 644-720 |
| | | | | | 1160-1287 |
| | | | | | 2653-3036 |
| | | | | | 3056-3407 |
| HWMHG26 | 135 | 957665 | AC022728 | 750 | 1-646 |
| HWMHG26 | 135 | 957665 | AL358233 | 751 | 1-646 |
| HWMHG26 | 135 | 957665 | AC022728 | 752 | 1-94 |
| | | | | | 1313-1471 |
| | | | | | 1810-1924 |
| | | | | | 2489-3147 |
| | | | | | 3265-3723 |
| | | | | | 3806-4126 |
| | | | | | 4847-5003 |
| | | | | | 6103-6314 |
| | | | | | 8204-9627 |
| | | | | | 11308-12123 |
| HWMHG26 | 135 | 957665 | AL358233 | 753 | 1-472 |
| HWMHT22 | 137 | 917570 | AL117342 | 754 | 1-670 |
| HWMHT22 | 137 | 917570 | AL117342 | 755 | 1-410 |
| HWMHT22 | 137 | 917570 | AL117342 | 756 | 1-325 |
| HWMHZ25 | 139 | 951699 | AC022883 | 757 | 1-529 |
| HWMHZ25 | 139 | 951699 | AC024938 | 758 | 1-529 |
| HWMHZ25 | 139 | 951699 | AC067824 | 759 | 1-529 |
| HWMHZ25 | 139 | 951699 | AC022883 | 760 | 1-625 |
| HWMHZ25 | 139 | 951699 | AC024938 | 761 | 1-625 |
| HWMHZ25 | 139 | 951699 | AC067824 | 762 | 1-625 |
| HWMID39 | 140 | 915686 | AC023821 | 763 | 1-488 |
| HWMID39 | 140 | 915686 | AC015879 | 764 | 1-488 |
| HWMID39 | 140 | 915686 | AP001542 | 765 | 1-488 |
| HWMID39 | 140 | 915686 | AC015879 | 766 | 1-322 |
| HWMID39 | 140 | 915686 | AP001542 | 767 | 1-322 |
| HWMIR03 | 141 | 922302 | AL354820 | 768 | 1-87 |
| | | | | | 142-514 |
| | | | | | 635-1085 |
| | | | | | 1089-1435 |
| HWMIR03 | 141 | 922302 | AL354820 | 769 | 1-432 |
| HWMJB68 | 142 | 914031 | AC041047 | 770 | 1-55 |
| | | | | | 694-1076 |
| | | | | | 2079-2184 |
| | | | | | 3311-3686 |
| | | | | | 4419-4827 |
| | | | | | 5308-5495 |
| HWMJB68 | 142 | 914031 | AC041047 | 771 | 1-149 |
| HWMJB68 | 142 | 914031 | AC041047 | 772 | 1-417 |
| HWMJE50 | 143 | 933501 | AC009985 | 773 | 1-366 |
| HWMJE50 | 143 | 933501 | AC010794 | 774 | 1-366 |
| HWMJE50 | 143 | 933501 | AC009985 | 775 | 1-419 |
| HWMJE50 | 143 | 933501 | AC010794 | 776 | 1-419 |
| HWMJE50 | 143 | 933501 | AC010794 | 777 | 1-298 |
| HWMKI01 | 144 | 913841 | AC009097 | 778 | 1-1453 |
| HWMKI01 | 144 | 913841 | AC009097 | 779 | 1-190 |
| HWMKI01 | 144 | 913841 | AC009097 | 780 | 1-462 |
| HWMMA12 | 147 | 969173 | AL359706 | 781 | 1-219 |
| HWMMA12 | 147 | 969173 | AL359706 | 782 | 1-106 |
| HWMMA12 | 147 | 969173 | AL359706 | 783 | 1-118 |
| HWMMY66 | 150 | 966367 | AL117339 | 784 | 1-5003 |
| HWMMY66 | 150 | 966367 | AL161931 | 785 | 1-5003 |
| HWMMY66 | 150 | 966367 | AF205588 | 786 | 1-2142 |
| HWMMY66 | 150 | 966367 | AL117339 | 787 | 1-107 |
| | | | | | 2195-4599 |
| HWMMY66 | 150 | 966367 | AL117339 | 788 | 1-476 |
| HWMMY66 | 150 | 966367 | AL161931 | 789 | 1-476 |
| HWMMY66 | 150 | 966367 | AL161931 | 790 | 1-107 |
| | | | | | 2195-4599 |
| HWMMY66 | 150 | 966367 | AF205588 | 791 | 1-107 |
| | | | | | 2196-4603 |
| HWMAE12 | 153 | 969692 | AC004601 | 792 | 1-125 |
| | | | | | 718-815 |
| | | | | | 1493-1641 |
| | | | | | 2613-3039 |
| | | | | | 4587-4761 |
| | | | | | 6771-6882 |
| | | | | | 7077-7304 |
| | | | | | 10590-10766 |
| HWMAE12 | 153 | 969692 | AC004601 | 793 | 1-321 |
| | | | | | 800-991 |
| | | | | | 1104-2613 |
| HWMAE12 | 153 | 969692 | AC004601 | 794 | 1-123 |
| HWLPN12 | 154 | 969572 | AC025758 | 795 | 1-39 |
| | | | | | 48-759 |
| | | | | | 823-1016 |
| | | | | | 1026-1055 |
| | | | | | 1104-1457 |
| | | | | | 2664-3918 |
| | | | | | 4119-4739 |
| | | | | | 5035-5940 |
| | | | | | 6056-8229 |
| HWLPN12 | 154 | 969572 | AC008810 | 796 | 1-52 |
| | | | | | 61-772 |
| | | | | | 836-1064 |
| | | | | | 1105-1458 |
| | | | | | 2657-3914 |
| | | | | | 4115-4735 |
| | | | | | 4764-5963 |
| | | | | | 6079-8001 |
| HWLPN12 | 154 | 969572 | AC008922 | 797 | 1-52 |
| | | | | | 61-772 |
| | | | | | 836-1064 |
| | | | | | 1105-1458 |
| | | | | | 2662-3919 |
| | | | | | 4120-4739 |
| | | | | | 5035-5940 |
| | | | | | 6056-9962 |
| HWLKQ11 | 158 | 965390 | AC012609 | 798 | 1-960 |
| | | | | | 2900-3067 |
| | | | | | 5601-7348 |
| HWLKQ11 | 158 | 965390 | AC012609 | 799 | 1-609 |
| HWLKQ11 | 158 | 965390 | AC012609 | 800 | 1-455 |
| HWLKJ03 | 160 | 922371 | AL080276 | 801 | 1-608 |
| HWLKJ03 | 160 | 922371 | AL080276 | 802 | 1-366 |
| HWLJM40 | 165 | 710519 | AL357774 | 803 | 1-2461 |
| HWLJM40 | 165 | 710519 | AL357774 | 804 | 1-473 |
| HWLJK01 | 166 | 914089 | AL353812 | 805 | 1-1171 |
| HWLJK01 | 166 | 914089 | AL353812 | 806 | 1-542 |
| | | | | | 1063-1113 |
| | | | | | 1121-1285 |
| | | | | | 1289-1699 |
| | | | | | 2521-2958 |
| | | | | | 3073-3581 |
| HWLIG05 | 168 | 928226 | AC032015 | 807 | 1-115 |
| | | | | | 229-332 |
| | | | | | 460-1278 |
| | | | | | 2740-4294 |
| HWLIG05 | 168 | 928226 | AC032015 | 808 | 1-507 |
| | | | | | 1273-1517 |
| | | | | | 2829-2947 |
| | | | | | 3153-3378 |
| | | | | | 3710-4111 |
| | | | | | 4341-4548 |
| | | | | | 4619-5121 |
| | | | | | 5743-5880 |
| | | | | | 6235-9287 |
| | | | | | 9620-10060 |
| HWLID27 | 169 | 682563 | AL109758 | 809 | 1-88 |
| | | | | | 1532-1860 |
| | | | | | 2113-2750 |
| HWLID27 | 169 | 682563 | AL109758 | 810 | 1-996 |
| HWLID27 | 169 | 682563 | AL109758 | 811 | 1-102 |
| HWLHU03 | 171 | 922931 | AC005073 | 812 | 1-447 |
| | | | | | 940-1180 |
| | | | | | 1852-2062 |
| | | | | | 2064-2154 |
| | | | | | 2609-2977 |
| | | | | | 3455-4244 |
| | | | | | 4796-5220 |
| | | | | | 6485-6924 |
| | | | | | 8360-8685 |
| | | | | | 8734-9287 |
| | | | | | 9704-10448 |
| | | | | | 11084-12000 |
| | | | | | 12226-13392 |
| | | | | | 13703-13772 |
| | | | | | 13805-14443 |
| | | | | | 14470-14888 |
| | | | | | 15137-16367 |
| | | | | | 16448-17023 |
| | | | | | 17096-17156 |
| | | | | | 17259-18000 |
| | | | | | 18350-18690 |
| | | | | | 18962-19128 |
| | | | | | 19420-19573 |
| | | | | | 19792-20077 |
| | | | | | 20124-22431 |
| | | | | | 22573-23150 |
| | | | | | 23223-23837 |
| | | | | | 24074-24172 |
| | | | | | 24218-24750 |
| | | | | | 24811-25121 |
| | | | | | 26008-27281 |
| | | | | | 27312-27680 |
| | | | | | 27891-28841 |
| | | | | | 29378-29581 |
| | | | | | 31206-31718 |
| HWLHU03 | 171 | 922931 | AC005071 | 813 | 1-447 |
| | | | | | 1852-2062 |
| | | | | | 2064-2154 |
| | | | | | 2609-2977 |
| | | | | | 3455-4244 |
| | | | | | 4796-5218 |
| | | | | | 6593-6924 |
| | | | | | 9903-10133 |
| | | | | | 11084-12000 |
| | | | | | 12226-13392 |
| | | | | | 13703-13772 |
| | | | | | 13805-14443 |
| | | | | | 14470-14888 |
| | | | | | 15137-16367 |
| | | | | | 16448-17010 |
| | | | | | 17096-17156 |
| | | | | | 17259-18000 |
| | | | | | 18350-18690 |
| | | | | | 18962-19128 |
| | | | | | 19420-19573 |
| | | | | | 19792-20077 |
| | | | | | 20124-22431 |
| | | | | | 22573-23150 |
| | | | | | 23223-23837 |
| | | | | | 24074-24172 |
| | | | | | 24218-24750 |
| | | | | | 24819-25110 |
| | | | | | 26008-27281 |
| | | | | | 27312-27680 |
| | | | | | 27891-28841 |
| | | | | | 29378-29581 |
| | | | | | 31206-31718 |
| HWLHU03 | 171 | 922931 | AC005073 | 814 | 1-853 |
| HWLHU03 | 171 | 922931 | AC005073 | 815 | 1-3333 |
| | | | | | 3556-3754 |
| | | | | | 3816-7381 |
| | | | | | 7384-7601 |
| | | | | | 7635-8330 |
| | | | | | 8572-8879 |
| | | | | | 8917-9030 |
| | | | | | 9088-9191 |
| | | | | | 9671-9908 |
| | | | | | 9911-13281 |
| | | | | | 13403-13828 |
| | | | | | 14157-15040 |
| | | | | | 15737-16040 |
| | | | | | 16205-16293 |
| | | | | | 17878-18795 |
| | | | | | 19197-19455 |
| | | | | | 19962-21676 |
| HWLHU03 | 171 | 922931 | AC005071 | 816 | 1-3015 |
| | | | | | 3238-3428 |
| | | | | | 3498-7063 |
| | | | | | 7066-7283 |
| | | | | | 7317-8012 |
| | | | | | 9349-12963 |
| | | | | | 13085-13595 |
| | | | | | 13839-14722 |
| | | | | | 15397-15722 |
| | | | | | 15887-15975 |
| | | | | | 17560-18477 |
| | | | | | 18879-19130 |
| | | | | | 19644-21358 |
| HWLHU03 | 171 | 922931 | AC005071 | 817 | 1-1300 |
| HWLHH62 | 173 | 876225 | AC006479 | 818 | 1-295 |
| | | | | | 401-1041 |
| | | | | | 1287-1501 |
| | | | | | 1662-1814 |
| | | | | | 2789-2906 |
| | | | | | 3392-3592 |
| | | | | | 3845-4125 |
| | | | | | 4152-4370 |
| | | | | | 4745-4823 |
| | | | | | 5224-5277 |
| | | | | | 5605-6301 |
| | | | | | 6562-6708 |
| | | | | | 6838-7401 |
| | | | | | 8406-8779 |
| | | | | | 10434-10800 |
| | | | | | 10833-11163 |
| | | | | | 11518-11577 |
| | | | | | 11805-12033 |
| | | | | | 12944-13064 |
| | | | | | 13493-14036 |
| HWLHH62 | 173 | 876225 | AC006479 | 819 | 1-481 |
| HWLHH62 | 173 | 876225 | AC006479 | 820 | 1-488 |
| HWLGA04 | 176 | 925682 | AC024339 | 821 | 1-574 |
| HWLGA04 | 176 | 925682 | AL360230 | 822 | 1-574 |
| HWLGA04 | 176 | 925682 | AL353576 | 823 | 1-147 |
| | | | | | 3046-3357 |
| | | | | | 5595-5895 |
| | | | | | 5898-9698 |
| | | | | | 10511-11084 |
| | | | | | 11199-12555 |
| | | | | | 13710-14007 |
| | | | | | 15469-15558 |
| HWLGA04 | 176 | 925682 | AC024339 | 824 | 1-3656 |
| HWLGA04 | 176 | 925682 | AL360230 | 825 | 1-147 |
| | | | | | 3042-3356 |
| | | | | | 5594-5894 |
| | | | | | 5897-9551 |
| HWLGA04 | 176 | 925682 | AC024339 | 826 | 1-363 |
| HWLGA04 | 176 | 925682 | AL360230 | 827 | 1-1355 |
| HWLGA04 | 176 | 925682 | AL353576 | 828 | 1-148 |
| HWLFY06 | 178 | 934635 | AC022211 | 829 | 1-658 |
| HWLFY06 | 178 | 934635 | AC022211 | 830 | 1-348 |
| HWLFY06 | 178 | 934635 | AC022211 | 831 | 1-341 |
| HWLFM69 | 181 | 754644 | AC009556 | 832 | 1-973 |
| HWLFM69 | 181 | 754644 | AL359314 | 833 | 1-973 |
| HWLFM69 | 181 | 754644 | AL161625 | 834 | 1-972 |
| HWLFM69 | 181 | 754644 | AC009556 | 835 | 1-657 |
| HWLFM69 | 181 | 754644 | AC009556 | 836 | 1-435 |
| | | | | | 1089-1708 |
| HWLFM69 | 181 | 754644 | AL359314 | 837 | 1-657 |
| HWLFM69 | 181 | 754644 | AL161625 | 838 | 1-435 |
| | | | | | 1094-1713 |
| HWLFM69 | 181 | 754644 | AL359314 | 839 | 1-435 |
| | | | | | 1094-1713 |
| HWLFM69 | 181 | 754644 | AL161625 | 840 | 1-657 |
| HWLFB71 | 183 | 759915 | AC032007 | 841 | 1-727 |
| HWLEZ11 | 184 | 966228 | AP001534 | 842 | 1-757 |
| | | | | | 951-2100 |
| HWLEZ11 | 184 | 966228 | AP001915 | 843 | 1-757 |
| | | | | | 951-2100 |
| HWLEZ11 | 184 | 966228 | AP001534 | 844 | 1-582 |
| HWLEZ11 | 184 | 966228 | AP001915 | 845 | 1-582 |
| HWLEI57 | 190 | 734267 | AL139329 | 846 | 1-471 |
| HWLEI57 | 190 | 734267 | AL139329 | 847 | 1-439 |
| HWLCM06 | 196 | 934117 | AC027590 | 848 | 1-479 |
| HWLCM06 | 196 | 934117 | AC027590 | 849 | 1-973 |
| HWLCM06 | 196 | 934117 | AC027590 | 850 | 1-294 |
| HWLBO06 | 199 | 934630 | AC016002 | 851 | 1-828 |
| HWLBO06 | 199 | 934630 | AC022322 | 852 | 1-828 |
| HWLBO06 | 199 | 934630 | AL121956 | 853 | 1-828 |
| HWLBO06 | 199 | 934630 | AL353625 | 854 | 1-828 |
| HWLBO06 | 199 | 934630 | AC016002 | 855 | 1-541 |
| HWLBO06 | 199 | 934630 | AC022322 | 856 | 1-541 |
| HWLBO06 | 199 | 934630 | AL121956 | 857 | 1-541 |
| HWLBO06 | 199 | 934630 | AL353625 | 858 | 1-541 |
| HWLBL75 | 201 | 766877 | AC005206 | 859 | 1-635 |
| | | | | | 652-1989 |
| | | | | | 2022-4665 |
| HWLBL75 | 201 | 766877 | AC005206 | 860 | 1-106 |
| HWLBI01 | 202 | 919168 | AF053356 | 861 | 1-71 |
| | | | | | 234-304 |
| | | | | | 320-826 |
| | | | | | 878-1099 |
| | | | | | 1233-1683 |
| | | | | | 2077-3297 |
| HWLBI01 | 202 | 919168 | AF053356 | 862 | 1-434 |
| HWLBI01 | 202 | 919168 | AF053356 | 863 | 1-152 |
| HWLAU04 | 203 | 953433 | AC010446 | 864 | 1-2080 |
| | | | | | 2973-3106 |
| | | | | | 4922-5450 |
| | | | | | 7094-7275 |
| HWLAQ11 | 204 | 966207 | AL356219 | 865 | 1-568 |
| HWLAC70 | 206 | 775771 | AL159140 | 866 | 1-1022 |
| | | | | | 1501-1886 |
| | | | | | 3286-3461 |
| | | | | | 5029-5197 |
| | | | | | 7054-7335 |
| | | | | | 8165-8289 |
| | | | | | 8371-9947 |
| | | | | | 10747-11774 |
| HWLAC70 | 206 | 775771 | AL159140 | 867 | 1-328 |
| HWLAC70 | 206 | 775771 | AL159140 | 868 | 1-604 |
| | | | | | 1036-2006 |
| | | | | | 2061-2201 |
| | | | | | 2725-3349 |
| HWLAC29 | 207 | 690263 | AC026468 | 869 | 1-849 |
| | | | | | 870-1491 |
| HWLAC29 | 207 | 690263 | AC026468 | 870 | 1-365 |
| HWLAB74 | 208 | 765196 | AL357774 | 871 | 1-1594 |
| HWLAB74 | 208 | 765196 | AL357774 | 872 | 1-376 |
| HRTAR64 | 209 | 575020 | AC018906 | 873 | 1-377 |
| HRTAR64 | 209 | 575020 | AC018906 | 874 | 1-2033 |
| | | | | | 2099-2839 |
| | | | | | 3195-3956 |
| | | | | | 5165-5605 |
| | | | | | 5645-6035 |
| HRTAR64 | 209 | 575020 | AC018906 | 875 | 1-1441 |
| HRTAR31 | 210 | 698417 | AL360005 | 876 | 1-898 |
| HRTAR31 | 210 | 698417 | Z96074 | 877 | 1-898 |
| HRTAN72 | 212 | 766328 | AC031984 | 878 | 1-367 |
| HRTAN72 | 212 | 766328 | AL390374 | 879 | 1-367 |
| HRTAN70 | 213 | 524889 | AC021165 | 880 | 1-279 |
| HRTAN70 | 213 | 524889 | AC010454 | 881 | 1-279 |
| HRTAN70 | 213 | 524889 | AC022435 | 882 | 1-278 |
| HRTAN70 | 213 | 524889 | AC024592 | 883 | 1-279 |
| HRTAN70 | 213 | 524889 | AC021165 | 884 | 1-84 |
| HRTAN70 | 213 | 524889 | AC022435 | 885 | 1-84 |
| HRTAN70 | 213 | 524889 | AC010454 | 886 | 1-84 |
| HRTAN70 | 213 | 524889 | AC024592 | 887 | 1-84 |
| HRTAN65 | 214 | 753913 | AC073838 | 888 | 1-2190 |
| | | | | | 2289-5733 |
| | | | | | 6296-6662 |
| HRTAD37 | 217 | 708782 | AC013533 | 889 | 1-585 |
| HRTAD37 | 217 | 708782 | AC010158 | 890 | 1-585 |
| HRTAD37 | 217 | 708782 | AC010162 | 891 | 1-585 |
| HRTAD37 | 217 | 708782 | AC013533 | 892 | 1-298 |
| HRTAD37 | 217 | 708782 | AC013533 | 893 | 1-111 |
| HRTAD37 | 217 | 708782 | AC010158 | 894 | 1-298 |
| HRTAD37 | 217 | 708782 | AC010162 | 895 | 1-111 |
| HRTAD37 | 217 | 708782 | AC010158 | 896 | 1-111 |
| HRTAD37 | 217 | 708782 | AC010162 | 897 | 1-297 |
| HGAMC08 | 219 | 958490 | AC008174 | 898 | 1-351 |
| HGAMC08 | 219 | 958490 | AC008174 | 899 | 1-463 |
| HCNSR78 | 220 | 773818 | AL357078 | 900 | 1-551 |
| HCNSR78 | 220 | 773818 | AC025866 | 901 | 1-551 |
| HCNSR78 | 220 | 773818 | AL357078 | 902 | 1-333 |
| HCNSR78 | 220 | 773818 | AC025866 | 903 | 1-333 |
| HCNSR32 | 221 | 699694 | AC073041 | 904 | 1-413 |
| HCNSR32 | 221 | 699694 | AC073041 | 905 | 1-538 |
| HCNSR32 | 221 | 699694 | AC073041 | 906 | 1-286 |
| HCNSE03 | 222 | 925492 | AC026347 | 907 | 1-954 |
| HCNSE03 | 222 | 925492 | AC026347 | 908 | 1-1101 |
| HCNDV73 | 223 | 764119 | AC019310 | 909 | 1-83 |
| | | | | | 3708-4178 |
| | | | | | 4287-4409 |
| | | | | | 5057-5168 |
| | | | | | 7946-8131 |
| | | | | | 8252-8642 |
| | | | | | 8735-9237 |
| | | | | | 9607-9740 |
| | | | | | 9794-10471 |
| | | | | | 11799-12500 |
| HCNDV73 | 223 | 764119 | AC019310 | 910 | 1-371 |
| HCNDV73 | 223 | 764119 | AC019310 | 911 | 1-361 |
| HCNDV41 | 224 | 862324 | AC024315 | 912 | 1-627 |
| HCNDV41 | 224 | 862324 | AL391001 | 913 | 1-623 |
| HCNDV41 | 224 | 862324 | AL391001 | 914 | 1-268 |
| HCNDV41 | 224 | 862324 | AC024315 | 915 | 1-268 |
| HCNDF65 | 226 | 747499 | AL161911 | 916 | 1-1368 |
| HCNDF65 | 226 | 747499 | AL354792 | 917 | 1-3635 |
| | | | | | 3862-4159 |
| | | | | | 4318-4904 |
| | | | | | 6635-7084 |
| | | | | | 7088-8048 |
| HCNDF65 | 226 | 747499 | AL161911 | 918 | 1-298 |
| HCNDF65 | 226 | 747499 | AL354792 | 919 | 1-532 |
| HCNDF65 | 226 | 747499 | AL354792 | 920 | 1-2620 |
| HCNDB86 | 227 | 785168 | AC026268 | 921 | 1-548 |
| HCNDB86 | 227 | 785168 | AC026268 | 922 | 1-226 |
| HCNCX91 | 228 | 789556 | AC009528 | 923 | 1-1122 |
| HCNCX91 | 228 | 789556 | AC009528 | 924 | 1-309 |
| HCNCX27 | 229 | 682479 | AC022834 | 925 | 1-483 |
| HCNCX27 | 229 | 682479 | AC022834 | 926 | 1-478 |
| HCNCX27 | 229 | 682479 | AC023214 | 927 | 1-483 |
| HCNCX27 | 229 | 682479 | AC023214 | 928 | 1-345 |
| HCNCT03 | 230 | 923344 | AL139155 | 929 | 1-471 |
| HCNCO59 | 231 | 738889 | AL133384 | 930 | 1-841 |
| HCNCF19 | 233 | 668043 | AC016757 | 931 | 1-825 |
| HCNCF19 | 233 | 668043 | AC016757 | 932 | 1-278 |
| HCNAZ20 | 234 | 670031 | AC022744 | 933 | 1-543 |
| HCNAZ20 | 234 | 670031 | AC015531 | 934 | 1-543 |
| HCNAZ20 | 234 | 670031 | AC009588 | 935 | 1-543 |
| HCNAZ20 | 234 | 670031 | AC022744 | 936 | 1-224 |
| HCNAZ20 | 234 | 670031 | AC015531 | 937 | 1-224 |
| HCNAZ20 | 234 | 670031 | AC009588 | 938 | 1-224 |
| HCNAT92 | 236 | 518899 | AC025883 | 939 | 1-108 |
| | | | | | 447-498 |
| | | | | | 2019-2265 |
| HCNAT92 | 236 | 518899 | AC025883 | 940 | 1-376 |
| HCNAT67 | 237 | 508295 | AC027678 | 941 | 1-94 |
| | | | | | 1661-1725 |
| | | | | | 5796-6058 |
| | | | | | 6224-6585 |
| | | | | | 7182-7626 |
| HCNAT67 | 237 | 508295 | AC022390 | 942 | 1-192 |
| | | | | | 1664-1728 |
| | | | | | 5801-6062 |
| | | | | | 6228-6589 |
| | | | | | 7186-10078 |
| HCNAQ26 | 238 | 685199 | AC072035 | 943 | 1-1115 |
| HCNAQ26 | 238 | 685199 | AC012404 | 944 | 1-1115 |
| HCNAP29 | 239 | 855685 | AC012320 | 945 | 1-455 |
| HCNAP29 | 239 | 855685 | AC004382 | 946 | 1-455 |
| HCNAL30 | 240 | 522672 | AC004519 | 947 | 1-120 |
| HCNAK11 | 241 | 967945 | AC003991 | 948 | 1-977 |
| HCNAA41 | 242 | 791545 | AF231129 | 949 | 1-970 |
| HCNAA41 | 242 | 791545 | AC026458 | 950 | 1-1382 |
| HCNAA41 | 242 | 791545 | AC069047 | 951 | 1-236 |
| | | | | | 552-842 |
| | | | | | 1745-3603 |
| | | | | | 3697-3797 |
| | | | | | 3977-4311 |
| | | | | | 4540-5215 |
| | | | | | 5349-5754 |
| | | | | | 5897-6069 |
| | | | | | 6293-6847 |
| | | | | | 7430-7862 |
| | | | | | 8779-9218 |
| HCNAA41 | 242 | 791545 | AC022674 | 952 | 1-196 |
| | | | | | 398-598 |
| | | | | | 605-680 |
| | | | | | 811-1547 |
| | | | | | 1568-2200 |
| | | | | | 2208-3590 |
| | | | | | 4511-5262 |
| | | | | | 5305-5455 |
| | | | | | 5885-5993 |
| | | | | | 6125-6553 |
| HCNAA41 | 242 | 791545 | AC026458 | 953 | 1-191 |
| HCNAA41 | 242 | 791545 | AC069047 | 954 | 1-224 |
| HCNAA41 | 242 | 791545 | AC026458 | 955 | 1-467 |
| HCNAA41 | 242 | 791545 | AC069047 | 956 | 1-276 |
| | | | | | 291-329 |
| | | | | | 335-615 |
| HCNAA41 | 242 | 791545 | AC022674 | 957 | 1-225 |

[0054] Table 1B summarizes additional polynucleotides encompassed by the invention (including cDNA clones related to the sequences (Clone ID NO:Z), contig sequences (contig identifier (Contig ID:) contig nucleotide sequence identifiers (SEQ ID NO:X)), and genomic sequences (SEQ ID NO:B). The first column provides a unique clone identifier, “Clone ID NO:Z”, for a cDNA clone related to each contig sequence. The second column provides the sequence identifier, “SEQ ID NO:X”, for each contig sequence. The third column provides a unique contig identifier, “Contig ID:” for each contig sequence. The fourth column, provides a BAC identifier “BAC ID NO:A” for the BAC clone referenced in the corresponding row of the table. The fifth column provides the nucleotide sequence identifier, “SEQ ID NO:B” for a fragment of the BAC clone identified in column four of the corresponding row of the table. The sixth column, “Exon From-To”, provides the location (i.e., nucleotide position numbers) within the polynucleotide sequence of SEQ ID NO:B which delineate certain polynucleotides of the invention that are also exemplary members of polynucleotide sequences that encode polypeptides of the invention (e.g., polypeptides containing amino acid sequences encoded by the polynucleotide sequences delineated in column six, and fragments and variants thereof).

TABLE 2

| | | | | | | Score/ | | |
|---|---|---|---|---|---|---|---|---|
| Clone ID | Contig | SEQ ID | Analysis | | PFam/NR Accession | Percent | NT | |
| NO: Z | ID: | NO: X | Method | PFam/NR Description | Number | Identity | From | NT To |
| HCNDL91 | 832209 | 32 | blastx.2 | transformation-related | gb\|AAA36776.1\| | 60% | 341 | 222 |
| | | | | protein [Homo sapiens] | | 50% | 121 | 86 |
| | | | | | | 33% | 142 | 80 |
| HCNUA60 | 695786 | 39 | HMMER | PFAM: Uncharacterized | PF01027 | 24.9 | 132 | 224 |
| | | | 2.1.1 | protein family | | | | |
| | | | blastx.2 | (AF151877) CGI-119 | gb\|AAD34114.1\|AF15 | 100% | 135 | 206 |
| | | | | protein [Homo sapiens] | 1877_1 | | | |
| HWLBK80 | 933865 | 45 | blastx.2 | The ha3662 gene | dbj\|BAA07648.1\| | 95% | 129 | 380 |
| | | | | product is related to | | | | |
| | | | | mouse glycerophosphate | | | | |
| | | | | dehydrogenase. [Homo | | | | |
| | | | | sapiens] | | | | |
| HWLEN08 | 958509 | 52 | blastx.2 | predicted using | emb\|CAB02762.1\| | 31% | 89 | 538 |
| | | | | Genefinder; cDNA EST | | | | |
| | | | | yk488a2.5 comes from | | | | |
| | | | | this gene | | | | |
| | | | | [Caenorhabditis elegans] | | | | |
| HWLEN20 | 963418 | 53 | HMMER | PFAM: Zinc finger, | PF00097 | 8.49 | 198 | 233 |
| | | | 1.8 | C3HC4 type (RING | | | | |
| | | | | finger) | | | | |
| HWLEO59 | 974078 | 54 | blastx.2 | (AK000385) unnamed | dbj\|BAA91131.1\| | 78% | 241 | 101 |
| | | | | protein product [Homo | | 56% | 401 | 231 |
| | | | | sapiens] | | | | |
| HWLFB08 | 849136 | 59 | blastx.2 | ubiquitin-conjugating | emb\|CAA76720.1\| | 80% | 2 | 517 |
| | | | | enzyme [Mus musculus] | | | | |
| HWLFE50 | 830283 | 61 | blastx.2 | (AK000496) unnamed | dbj\|BAA91205.1\| | 67% | 326 | 12 |
| | | | | protein product [Homo | | | | |
| | | | | sapiens] | | | | |
| HWLFP37 | 708985 | 70 | blastx.2 | (AF090942) PRO0657 | gb\|AAF24054.1\|AF09 | 65% | 150 | 305 |
| | | | | [Homo sapiens] | 0942_1 | 54% | 95 | 166 |
| HWLHP05 | 931087 | 84 | blastx.2 | (AF010144) neuronal | gb\|AAC08737.1\| | 47% | 418 | 215 |
| | | | | thread protein AD7c- | | 67% | 417 | 319 |
| | | | | NTP [Homo sapiens] | | 78% | 305 | 249 |
| | | | | | | 61% | 417 | 319 |
| | | | | | | 84% | 59 | 3 |
| | | | | | | 48% | 326 | 228 |
| | | | | | | 80% | 47 | 3 |
| | | | | | | 52% | 417 | 349 |
| | | | | | | 45% | 412 | 317 |
| | | | | | | 37% | 326 | 240 |
| | | | | | | 62% | 307 | 260 |
| HWLHR93 | 952387 | 85 | HMMER | PFAM: Zinc finger, | PF00098 | 6.04 | 211 | 231 |
| | | | 1.8 | CCHC class | | | | |
| HWLHT06 | 934217 | 86 | blastx.2 | (AK000301) unnamed | dbj\|BAA91067.1\| | 76% | 203 | 57 |
| | | | | protein product [Homo | | 76% | 63 | 1 |
| | | | | sapiens] | | | | |
| HWLIL65 | 747440 | 90 | blastx.2 | (AK000496) unnamed | dbj\|BAA91205.1\| | 63% | 188 | 6 |
| | | | | protein product [Homo | | | | |
| | | | | sapiens] | | | | |
| HWLJC30 | 830232 | 96 | blastx.2 | (AK000258) unnamed | dbj\|BAA91037.1\| | 62% | 95 | 421 |
| | | | | protein product [Homo | | 100% | 328 | 441 |
| | | | | sapiens] | | | | |
| HWLJL46 | 830226 | 100 | blastx.2 | (AF090931) PRO0483 | gb\|AAF24046.1\|AF09 | 59% | 138 | 13 |
| | | | | [Homo sapiens] | 0931_1 | | | |
| | 956205 | 105 | HMMER | PFAM: UDP- | PF00201 | 47.54 | 5 | 133 |
| HWLKC87 | | | 1.8 | glucoronosyl and UDP- | | | | |
| | | | | glucosyl transferases | | | | |
| | | | blastx.2 | UDP- | gb\|AAD14400.1\|S824 | 58% | 5 | 121 |
| | | | | glucuronosyltransferase | 85_1 | | | |
| | | | | isoform [Homo sapiens] | | | | |
| HWLKW04 | 969141 | 111 | HMMER | PFAM: Ribosomal | PF01667 | 107.7 | 176 | 310 |
| | | | 2.1.1 | protein S27 | | | | |
| | | | blastx.2 | (AF070668) 40S | gb\|AAD20974.1\| | 82% | 95 | 322 |
| | | | | ribosomal protein S27 | | 80% | 301 | 345 |
| | | | | isoform [Homo sapiens] | | | | |
| HWLLB11 | 954849 | 114 | HMMER | PFAM: Cytochrome | PF00067 | 159.13 | 75 | 506 |
| | | | 1.8 | P450 | | | | |
| | | | blastx.2 | (AF091117) cytochrome | gb\|AAF09264.1\|AF09 | 40% | 78 | 509 |
| | | | | P450 [Orconectes | 1117_1 | 53% | 1 | 90 |
| | | | | limosus] | | | | |
| HWMAD05 | 931076 | 123 | blastx.2 | galactosylceramide-like | pir\|JC5238\|JC5238 | 68% | 144 | 22 |
| | | | | protein, GCP -human | | | | |
| HWMEU56 | 922375 | 126 | blastx.2 | (AB012223) ORF2 | dbj\|BAA25253.1\| | 63% | 59 | 196 |
| | | | | [Canis familiaris] | | 53% | 380 | 424 |
| HWMFA28 | 965354 | 127 | blastx.2 | (AE001886) | gb\|AAF09840.1\|AE00 | 52% | 178 | 47 |
| | | | | hypothetical protein | 1886_6 | 50% | 47 | 6 |
| | | | | [Deinococcus | | | | |
| | | | | radiodurans] | | | | |
| HWMFG32 | 883180 | 129 | blastx.2 | (AK002129) unnamed | dbj\|BAA92096.1\| | 75% | 136 | 5 |
| | | | | protein product [Homo | | | | |
| | | | | sapiens] | | | | |
| HWMGL13 | 947969 | 133 | blastx.2 | laminin alpha 5 chain | gb\|AAC53430.1\| | 77% | 3 | 371 |
| | | | | [Mus musculus] | | 62% | 376 | 423 |
| HWMHG26 | 957665 | 135 | blastx.2 | (AL110233) | emb\|CAB53686.1\| | 71% | 131 | 36 |
| | | | | hypothetical protein | | 78% | 42 | 1 |
| | | | | [Homo sapiens] | | | | |
| HWMHX12 | 914007 | 138 | blastx.2 | (AB008185) ganglioside | dbj\|BAA82611.1\| | 64% | 15 | 275 |
| | | | | sialidase [Homo | | 40% | 278 | 619 |
| | | | | sapiens] | | 33% | 572 | 730 |
| HWMJB68 | 914031 | 142 | blastx.2 | (AK000496) unnamed | dbj\|BAA91205.1\| | 62% | 395 | 63 |
| | | | | protein product [Homo | | | | |
| | | | | sapiens] | | | | |
| HWMKI01 | 913841 | 144 | blastx.2 | (AK000496) unnamed | dbj\|BAA91205.1\| | 67% | 575 | 372 |
| | | | | protein product [Homo | | | | |
| | | | | sapiens] | | | | |
| HWMKI10 | 961616 | 145 | blastx.2 | (AF155219) MAB21L2 | gb\|AAD40248.1\|AF15 | 100% | 2 | 286 |
| | | | | [Homo sapiens] | 5219_1 | | | |
| HWMLG23 | 961110 | 146 | blastx.2 | (AF151802) CGI-44 | gb\|AAD34039.1\|AF15 | 100% | 144 | 242 |
| | | | | protein [Homo sapiens] | 1802_1 | | | |
| HWLPN12 | 969572 | 154 | blastx.2 | (AK000496) unnamed | dbj\|BAA91205.1\| | 62% | 458 | 249 |
| | | | | protein product [Homo | | 64% | 241 | 191 |
| | | | | sapiens] | | | | |
| HWLLZ91 | 887157 | 155 | blastx.2 | (AL022322) bK228A9.2 | emb\|CAB62940.1\| | 98% | 143 | 463 |
| | | | | (novel protein similar to | | | | |
| | | | | FAS-ligand 1 substrate) | | | | |
| | | | | [Homo sapiens] | | | | |
| HWLKT19 | 974292 | 157 | blastx.2 | B-cell growth factor | gb\|AAB02649.1\| | 65% | 367 | 480 |
| | | | | [Homo sapiens] | | | | |
| HWLKQ11 | 965390 | 158 | blastx.2 | (AK000928) unnamed | dbj\|BAA91431.1\| | 82% | 109 | 8 |
| | | | | protein product [Homo | | | | |
| | | | | sapiens] | | | | |
| HWLKJ18 | 930414 | 159 | blastx.2 | (AK000385) unnamed | dbj\|BAA91131.1\| | 53% | 77 | 211 |
| | | | | protein product [Homo | | 85% | 213 | 275 |
| | | | | sapiens] | | | | |
| HWLJW12 | 969556 | 161 | blastx.2 | (AL117639) | emb\|CAB56027.1\| | 96% | 408 | 488 |
| | | | | hypothetical protein | | | | |
| | | | | [Homo sapiens] | | | | |
| HWLHH62 | 876225 | 173 | blastx.2 | (AF115384) LR8 | gb\|AAD23440.1\|AF11 | 100% | 4 | 108 |
| | | | | [Homo sapiens] | 5384_1 | | | |
| HWLHD19 | 887203 | 174 | blastx.2 | (AF071787) melastatin | gb\|AAC80000.1\| | 43% | 84 | 629 |
| | | | | 1 [Homo sapiens] | | | | |
| HWLGV14 | 967914 | 175 | blastx.2 | (AF115384) LR8 | gb\|AAD23440.1\|AF11 | 95% | 169 | 384 |
| | | | | [Homo sapiens] | 5384_1 | | | |
| HWLFY91 | 789569 | 177 | blastx.2 | (AF084256) beta | gb\|AAD17791.1\| | 67% | 246 | 145 |
| | | | | glucuronidase isoform d | | 63% | 143 | 111 |
| | | | | [Homo sapiens] | | | | |
| HWLEM80 | 886651 | 186 | blastx.2 | PC6B [Mus musculus] | dbj\|BAA04507.1\| | 57% | 87 | 767 |
| | | | | | | 34% | 93 | 539 |
| | | | | | | 36% | 117 | 539 |
| | | | | | | 35% | 87 | 488 |
| | | | | | | 32% | 90 | 548 |
| | | | | | | 33% | 87 | 512 |
| | | | | | | 34% | 57 | 539 |
| | | | | | | 34% | 90 | 497 |
| | | | | | | 31% | 84 | 506 |
| | | | | | | 31% | 84 | 524 |
| | | | | | | 26% | 69 | 488 |
| | | | | | | 33% | 114 | 539 |
| | | | | | | 33% | 111 | 509 |
| | | | | | | 34% | 258 | 539 |
| | | | | | | 37% | 87 | 182 |
| HWLEI57 | 734267 | 190 | blastx.2 | alternatively spliced | gb\|AAB49034.1\| | 75% | 468 | 346 |
| | | | | product using exon 13A | | 62% | 347 | 198 |
| | | | | [Homo sapiens] | | | | |
| HWLEF27 | 682572 | 192 | blastx.2 | (AF090989) high-risk | gb\|AAD12543.1\| | 41% | 2 | 259 |
| | | | | human papilloma | | | | |
| | | | | viruses E6 oncoproteins | | | | |
| | | | | 1 sapiens] | | | | |
| HWLEA48 | 927676 | 193 | HMMER | PFAM: Eukaryotic | PF00069 | 32.82 | 190 | 381 |
| | | | 1.8 | protein kinase domain | | | | |
| | | | blastx.2 | (AF169034) protein | gb\|AAF12757.2\|AF16 | 59% | 154 | 429 |
| | | | | kinase [Homo sapiens] | 9034_1 | 100% | 89 | 166 |
| | | | | | | 51% | 287 | 415 |
| HWLDB04 | 887051 | 195 | HMMER | PFAM: Putative | PF01062 | 86.8 | 37 | 285 |
| | | | 2.1.1 | membrane protein | | | | |
| | | | blastx.2 | (AF057170) bestrophin | gb\|AAC64344.1\| | 55% | 37 | 285 |
| | | | | [Homo sapiens] | | 62% | 393 | 440 |
| HWLCG42 | 975246 | 197 | HMMER | PFAM: IG | PF00047 | 2.07 | 414 | 440 |
| | | | 1.8 | (immunoglobulin) | | | | |
| | | | | superfamily | | | | |
| | | | blastx.2 | (AK000496) unnamed | dbj\|BAA91205.1\| | 53% | 685 | 512 |
| | | | | protein product [Homo | | | | |
| | | | | sapiens] | | | | |
| HWLBN90 | 787355 | 200 | HMMER | PFAM: HMG (high | PF00505 | 5.11 | 440 | 529 |
| | | | 1.8 | mobility group) box | | | | |
| | | | blastx.2 | (AF155115) NY-REN- | gb\|AAD42881.1\|AF15 | 100% | 419 | 610 |
| | | | | 58 antigen [Homo | 5115_1 | 100% | 385 | 417 |
| | | | | sapiens] | | | | |
| HWLBL75 | 766877 | 201 | blastx.2 | (AF060862) unknown | gb\|AAC15461.1\| | 95% | 3 | 137 |
| | | | | [Homo sapiens] | | | | |
| HWLBI01 | 919168 | 202 | blastx.2 | (AF053356) ORF3, | gb\|AAC78797.1\| | 94% | 107 | 214 |
| | | | | splicevariantc [Homo | | 100% | 52 | 72 |
| | | | | sapiens] | | | | |
| HRTAN72 | 766328 | 212 | blastx.2 | unknown [Homo | gb\|AAB50206.1\| | 67% | 150 | 260 |
| | | | | sapiens] | | 34% | 28 | 114 |
| HRTAE57 | 871385 | 216 | blastx.2 | (AF201947) MEK | gb\|AAF17239.1\|AF20 | 87% | 158 | 388 |
| | | | | binding partner 1 [Homo | 1947_1 | | | |
| | | | | sapiens] | | | | |
| HCNAY45 | 716992 | 235 | blastx.2 | hypothetical protein | pir\|S72489\|S72489 | 85% | 602 | 477 |
| | | | | Tigger 2 -human | | | | |
| | | | | transposon MER37 1 | | | | |
| HCNAT67 | 508295 | 237 | blastx.2 | (AF161356) HSPC093 | gb\|AAF28916.1\|AF16 | 73% | 206 | 274 |
| | | | | [Homo sapiens] | 1356_1 | 48% | 90 | 218 |

[0055] Table 2 further characterizes certain encoded polypeptides of the invention, by providing the results of comparisons to protein and protein family databases. The first column provides a unique clone identifier, “Clone ID NO:”, corresponding to a cDNA clone disclosed in Table 1A. The second column provides the unique contig indentifier, “Contig ID:” which allows correlation with the information in Table 1A. The third column provides the sequence identifier, “SEQ ID NO:X”, for the contig polynucleotide sequences. The fourth column provides the analysis method by which the homology/identity disclosed in the row was determined. The fifth column provides a description of PFam/NR hits having significant matches identified by each analysis. Column six provides the accession number of the PFam/NR hit disclosed in the fifth column. Column seven, “Score/Percent Identity”, provides a quality score or the percent identity, of the hit disclosed in column five. Comparisons were made between polypeptides encoded by polynucleotides of the invention and a non-redundant protein database (herein referred to as “NR”), or a database of protein families (herein referred to as “PFam”), as described below.

[0056] The NR database, which comprises the NBRF PIR database, the NCBI GenPept database, and the SIB SwissProt and TrEMBL databases, was made non-redundant using the computer program nrdb2 (Warren Gish, Washington University in Saint Louis). Each of the polynucleotides shown in Table 1A, column 3 (e.g., SEQ ID NO:X or the ‘Query’ sequence) was used to search against the NR database. The computer program BLASTX was used to compare a 6-frame translation of the Query sequence to the NR database (for information about the BLASTX algorithm please see Altshul et al., J. Mol. Biol. 215:403-410 (1990), and Gish et al., Nat. Genet. 3:266-272 (1993)). A description of the sequence that is most similar to the Query sequence (the highest scoring ‘Subject’) is shown in column five of Table 2 and the database accession number for that sequence is provided in column six. The highest scoring ‘Subject’ is reported in Table 2 if (a) the estimated probability that the match occurred by chance alone is less than 1.0e-07, and (b) the match was not to a known repetitive element. BLASTX returns alignments of short polypeptide segments of the Query and Subject sequences which share a high degree of similarity; these segments are known as High-Scoring Segment Pairs or HSPs. Table 2 reports the degree of similarity between the Query and the Subject for each HSP as a percent identity in Column 7. The percent identity is determined by dividing the number of exact matches between the two aligned sequences in the HSP, dividing by the number of Query amino acids in the HSP and multiplying by 100. The polynucleotides of SEQ ID NO:X which encode the polypeptide sequence that generates an HSP are delineated by columns 8 and 9 of Table 2.

[0057] The PFam database, PFam version 5.2, (Sonnhammer et al., Nucl. Acids Res., 26:320-322, (1998)) consists of a series of multiple sequence alignments; one alignment for each protein family. Each multiple sequence alignment is converted into a probability model called a Hidden Markov Model, or HMM, that represents the position-specific variation among the sequences that make up the multiple sequence alignment (see, e.g., R. Durbin et al., Biological sequence analysis: probabilistic models of proteins and nucleic acids, Cambridge University Press, 1998 for the theory of HMMs). The program HMMER version 1.8 (Sean Eddy, Washington University in Saint Louis) was used to compare the predicted protein sequence for each Query sequence (SEQ ID NO:Y in Table 1A) to each of the HMMs derived from PFam version 5.2. A HMM derived from PFam version 5.2 was said to be a significant match to a polypeptide of the invention if the score returned by HMMER 1.8 was greater than 0.8 times the HMMER 1.8 score obtained with the most distantly related known member of that protein family. The description of the PFam family which shares a significant match with a polypeptide of the invention is listed in column 5 of Table 2, and the database accession number of the PFam hit is provided in column 6. Column 7 provides the score returned by HMMER version 1.8 for the alignment. Columns 8 and 9 delineate the polynucleotides of SEQ ID NO:X which encode the polypeptide sequence which shows a significant match to a PFam protein family.

[0058] As mentioned, columns 8 and 9 in Table 2, “NT From” and “NT To”, delineate the polynucleotides of “SEQ ID NO:X” that encode a polypeptide having a significant match to the PFam/NR database as disclosed in the fifth column of Table 2. In one embodiment, the invention provides a protein comprising, or alternatively consisting of, a polypeptide encoded by the polynucleotides of SEQ ID NO:X delineated in columns 8 and 9 of Table 2. Also provided are polynucleotides encoding such proteins, and the complementary strand thereto.

[0059] The nucleotide sequence SEQ ID NO:X and the translated SEQ ID NO:Y are sufficiently accurate and otherwise suitable for a variety of uses well known in the art and described further below. For instance, the nucleotide sequences of SEQ ID NO:X are useful for designing nucleic acid hybridization probes that will detect nucleic acid sequences contained in SEQ ID NO:X or the cDNA contained in Clone ID NO:Z. These probes will also hybridize to nucleic acid molecules in biological samples, thereby enabling immediate applications in chromosome mapping, linkage analysis, tissue identification and/or typing, and a variety of forensic and diagnostic methods of the invention. Similarly, polypeptides identified from SEQ ID NO:Y may be used to generate antibodies which bind specifically to these polypeptides, or fragments thereof, and/or to the polypeptides encoded by the cDNA clones identified in, for example, Table 1A.

[0060] Nevertheless, DNA sequences generated by sequencing reactions can contain sequencing errors. The errors exist as misidentified nucleotides, or as insertions or deletions of nucleotides in the generated DNA sequence. The erroneously inserted or deleted nucleotides cause frame shifts in the reading frames of the predicted amino acid sequence. In these cases, the predicted amino acid sequence diverges from the actual amino acid sequence, even though the generated DNA sequence may be greater than 99.9% identical to the actual DNA sequence (for example, one base insertion or deletion in an open reading frame of over 1000 bases).

[0061] Accordingly, for those applications requiring precision in the nucleotide sequence or the amino acid sequence, the present invention provides not only the generated nucleotide sequence identified as SEQ ID NO:X, and a predicted translated amino acid sequence identified as SEQ ID NO:Y, but also a sample of plasmid DNA containing cDNA Clone ID NO:Z (deposited with the ATCC on Oct. 5, 2000, and receiving ATCC designation numbers PTA 2574 and PTA 2575; deposited with the ATCC on Jan. 5, 2001, having the depositor reference numbers TS-1, TS-2, AC-1, and AC-2; and/or as set forth, for example, in Tables 1A, 6 and 7). The nucleotide sequence of each deposited clone can readily be determined by sequencing the deposited clone in accordance with known methods. Further, techniques known in the art can be used to verify the nucleotide sequences of SEQ ID NO:X.

[0062] The predicted amino acid sequence can then be verified from such deposits. Moreover, the amino acid sequence of the protein encoded by a particular clone can also be directly determined by peptide sequencing or by expressing the protein in a suitable host cell containing the deposited human cDNA, collecting the protein, and determining its sequence.

[0063] RACE Protocol For Recovery of Full-Length Genes

[0064] Partial cDNA clones can be made full-length by utilizing the rapid amplification of cDNA ends (RACE) procedure described in Frohman, M. A., et al., Proc. Nat'l. Acad. Sci. USA, 85:8998-9002 (1988). A cDNA clone missing either the 5′ or 3′ end can be reconstructed to include the absent base pairs extending to the translational start or stop codon, respectively. In some cases, cDNAs are missing the start codon of translation. The following briefly describes a modification of this original 5′ RACE procedure. Poly A+ or total RNA is reverse transcribed with Superscript II (Gibco/BRL) and an antisense or complementary primer specific to the cDNA sequence. The primer is removed from the reaction with a Microcon Concentrator (Amicon). The first-strand cDNA is then tailed with dATP and terminal deoxynucleotide transferase (Gibco/BRL). Thus, an anchor sequence is produced which is needed for PCR amplification. The second strand is synthesized from the dA-tail in PCR buffer, Taq DNA polymerase (Perkin-Elmer Cetus), an oligo-dT primer containing three adjacent restriction sites (XhoI, SalI and ClaI) at the 5′ end and a primer containing just these restriction sites. This double-stranded cDNA is PCR amplified for 40 cycles with the same primers as well as a nested cDNA-specific antisense primer. The PCR products are size-separated on an ethidium bromide-agarose gel and the region of gel containing cDNA products the predicted size of missing protein-coding DNA is removed. cDNA is purified from the agarose with the Magic PCR Prep kit (Promega), restriction digested with XhoI or SalI, and ligated to a plasmid such as pBluescript SKII (Stratagene) at XhoI and EcoRV sites. This DNA is transformed into bacteria and the plasmid clones sequenced to identify the correct protein-coding inserts. Correct 5′ ends are confirmed by comparing this sequence with the putatively identified homologue and overlap with the partial cDNA clone. Similar methods known in the art and/or commercial kits are used to amplify and recover 3′ ends.

[0065] Several quality-controlled kits are commercially available for purchase. Similar reagents and methods to those above are supplied in kit form from Gibco/BRL for both 5′ and 3′ RACE for recovery of full length genes. A second kit is available from Clontech which is a modification of a related technique, SLIC (single-stranded ligation to single-stranded cDNA), developed by Dumas et al., Nucleic Acids Res., 19:5227-32 (1991). The major differences in procedure are that the RNA is alkaline hydrolyzed after reverse transcription and RNA ligase is used to join a restriction site-containing anchor primer to the first-strand cDNA. This obviates the necessity for the dA-tailing reaction which results in a polyT stretch that is difficult to sequence past.

[0066] An alternative to generating 5′ or 3′ cDNA from RNA is to use cDNA library double-stranded DNA. An asymmetric PCR-amplified antisense cDNA strand is synthesized with an antisense cDNA-specific primer and a plasmid-anchored primer. These primers are removed and a symmetric PCR reaction is performed with a nested cDNA-specific antisense primer and the plasmid-anchored primer.

[0067] RNA Ligase Protocol for Generating the 5′ or 3′ End Sequences to Obtain Full Length Genes

[0068] Once a gene of interest is identified, several methods are available for the identification of the 5′ or 3′ portions of the gene which may not be present in the original cDNA plasmid. These methods include, but are not limited to, filter probing, clone enrichment using specific probes and protocols similar and identical to 5′ and 3′ RACE. While the full length gene may be present in the library and can be identified by probing, a useful method for generating the 5′ or 3′ end is to use the existing sequence information from the original cDNA to generate the missing information. A method similar to 5′ RACE is available for generating the missing 5′ end of a desired full-length gene. (This method was published by Fromont-Racine et al., Nucleic Acids Res., 21(7):1683-1684 (1993)). Briefly, a specific RNA oligonucleotide is ligated to the 5′ ends of a population of RNA presumably containing full-length gene RNA transcript. A primer set containing a primer specific to the ligated RNA oligonucleotide and a primer specific to a known sequence of the gene of interest, is used to PCR amplify the 5′ portion of the desired full length gene which may then be sequenced and used to generate the full length gene. This method starts with total RNA isolated from the desired source, poly A RNA may be used but is not a prerequisite for this procedure. The RNA preparation may then be treated with phosphatase if necessary to eliminate 5′ phosphate groups on degraded or damaged RNA, which may interfere with the later RNA ligase step. The phosphatase, if used, is then inactivated and the RNA is treated with tobacco acid pyrophosphatase in order to remove the cap structure present at the 5′ ends of messenger RNAs. This reaction leaves a 5′ phosphate group at the 5′ end of the cap cleaved RNA which can then be ligated to an RNA oligonucleotide using T4 RNA ligase. This modified RNA preparation can then be used as a template for first strand cDNA synthesis using a gene specific oligonucleotide. The first strand synthesis reaction can then be used as a template for PCR amplification of the desired 5′ end using a primer specific to the ligated RNA oligonucleotide and a primer specific to the known sequence of the colon antigen of interest. The resultant product is then sequenced and analyzed to confirm that the 5′ end sequence belongs to the relevant colon antigen.

[0069] The present invention also relates to vectors or plasmids, which include such DNA sequences, as well as the use of the DNA sequences. The material deposited with the ATCC (deposited with the ATCC on Oct. 5, 2000, and receiving ATCC designation numbers PTA 2574 and PTA 2575; deposited with the ATCC on Jan. 5, 2001, having the depositor reference numbers TS-1, TS-2, AC-1, and AC-2; and/or as set forth, for example, in Tables 1A, 6 and 7) is a mixture of cDNA clones derived from a variety of human tissue and cloned in either a plasmid vector or a phage vector, as shown, for example, in Table 7. These deposits are referred to as “the deposits” herein. The tissues from which some of the clones were derived are listed in Table 7, and the vector in which the corresponding cDNA is contained is also indicated in Table 7. The deposited material includes cDNA clones corresponding to SEQ ID NO:X described, for example, in Table 1A (Clone ID NO:Z). A clone which is isolatable from the ATCC Deposits by use of a sequence listed as SEQ ID NO:X, may include the entire coding region of a human gene or in other cases such clone may include a substantial portion of the coding region of a human gene. Furthermore, although the sequence listing may in some instances list only a portion of the DNA sequence in a clone included in the ATCC Deposits, it is well within the ability of one skilled in the art to sequence the DNA included in a clone contained in the ATCC Deposits by use of a sequence (or portion thereof) described in, for example Tables 1A or 2 by procedures hereinafter further described, and others apparent to those skilled in the art.

[0070] Also provided in Table 7 is the name of the vector which contains the cDNA clone. Each vector is routinely used in the art. The following additional information is provided for convenience.

[0071] Vectors Lambda Zap (U.S. Pat. Nos. 5,128,256 and 5,286,636), Uni-Zap XR (U.S. Pat. Nos. 5,128,256 and 5,286,636), Zap Express (U.S. Pat. Nos. 5,128,256 and 5,286,636), pBluescript (pBS) (Short, J. M. et al., Nucleic Acids Res. 16:7583-7600 (1988); Alting-Mees, M. A. and Short, J. M., Nucleic Acids Res. 17:9494 (1989)) and pBK (Alting-Mees, M. A. et al., Strategies 5:58-61 (1992)) are commercially available from Stratagene Cloning Systems, Inc., 11011 N. Torrey Pines Road, La Jolla, Calif., 92037. pBS contains an ampicillin resistance gene and pBK contains a neomycin resistance gene. Phagemid pBS may be excised from the Lambda Zap and Uni-Zap XR vectors, and phagemid pBK may be excised from the Zap Express vector. Both phagemids may be transformed into E. coli strain XL-1 Blue, also available from Stratagene.

[0072] Vectors pSport1, pCMVSport 1.0, pCMVSport 2.0 and pCMVSport 3.0, were obtained from Life Technologies, Inc., P. O. Box 6009, Gaithersburg, Md. 20897. All Sport vectors contain an ampicillin resistance gene and may be transformed into E. coli strain DH10B, also available from Life Technologies. See, for instance, Gruber, C. E., et al., Focus 15:59-(1993). Vector lafmid BA (Bento Soares, Columbia University, New York, N.Y.) contains an ampicillin resistance gene and can be transformed into E. coli strain XL-1 Blue. Vector pCR®2.1, which is available from Invitrogen, 1600 Faraday Avenue, Carlsbad, Calif. 92008, contains an ampicillin resistance gene and may be transformed into E. coli strain DH10B, available from Life Technologies. See, for instance, Clark, J. M., Nuc. Acids Res. 16:9677-9686 (1988) and Mead, D. et al., Bio/Technology 9: (1991).

[0073] The present invention also relates to the genes corresponding to SEQ ID NO:X, SEQ ID NO:Y, and/or the deposited clone (Clone ID NO:Z). The corresponding gene can be isolated in accordance with known methods using the sequence information disclosed herein. Such methods include preparing probes or primers from the disclosed sequence and identifying or amplifying the corresponding gene from appropriate sources of genomic material.

[0074] Also provided in the present invention are allelic variants, orthologs, and/or species homologs. Procedures known in the art can be used to obtain full-length genes, allelic variants, splice variants, full-length coding portions, orthologs, and/or species homologs of colon associated genes corresponding to SEQ ID NO:X or the complement thereof, polypeptides encoded by SEQ ID NO:X or the complement thereof, and/or the CDNA contained in Clone ID NO:Z, using information from the sequences disclosed herein or the clones deposited with the ATCC. For example, allelic variants and/or species homologs may be isolated and identified by making suitable probes or primers from the sequences provided herein and screening a suitable nucleic acid source for allelic variants and/or the desired homologue.

[0075] The polypeptides of the invention can be prepared in any suitable manner. Such polypeptides include isolated naturally occurring polypeptides, recombinantly produced polypeptides, synthetically produced polypeptides, or polypeptides produced by a combination of these methods. Means for preparing such polypeptides are well understood in the art.

[0076] The polypeptides may be in the form of the secreted protein, including the mature form, or may be a part of a larger protein, such as a fusion protein (see below). It is often advantageous to include an additional amino acid sequence which contains secretory or leader sequences, pro-sequences, sequences which aid in purification, such as multiple histidine residues, or an additional sequence for stability during recombinant production.

[0077] The polypeptides of the present invention are preferably provided in an isolated form, and preferably are substantially purified. A recombinantly produced version of a polypeptide, including the secreted polypeptide, can be substantially purified using techniques described herein or otherwise known in the art, such as, for example, by the one-step method described in Smith and Johnson, Gene 67:31-40 (1988). Polypeptides of the invention also can be purified from natural, synthetic or recombinant sources using techniques described herein or otherwise known in the art, such as, for example, antibodies of the invention raised against the colon polypeptides of the present invention in methods which are well known in the art.

[0078] The present invention provides a polynucleotide comprising, or alternatively consisting of, the nucleic acid sequence of SEQ ID NO:X, and/or the cDNA sequence contained in Clone ID NO:Z. The present invention also provides a polypeptide comprising, or alternatively, consisting of, the polypeptide sequence of SEQ ID NO:Y, a polypeptide encoded by SEQ ID NO:X or a complement thereof, a polypeptide encoded by the cDNA contained in Clone ID NO:Z, and/or the polypeptide sequence encoded by a nucleotide sequence in SEQ ID NO:B as defined in column 6 of Table 1B. Polynucleotides encoding a polypeptide comprising, or alternatively consisting of the polypeptide sequence of SEQ ID NO:Y, a polypeptide encoded by SEQ ID NO:X, a polypeptide encoded by the cDNA contained in Clone ID NO:Z and/or a polypeptide sequence encoded by a nucleotide sequence in SEQ ID NO:B as defined in column 6 of Table 1B are also encompassed by the invention. The present invention further encompasses a polynucleotide comprising, or alternatively consisting of, the complement of the nucleic acid sequence of SEQ ID NO:X, a nucleic acid sequence encoding a polypeptide encoded by the complement of the nucleic acid sequence of SEQ ID NO:X, and/or the cDNA contained in Clone ID NO:Z.

[0079] Moreover, representative examples of polynucleotides of the invention comprise, or alternatively consist of, one, two, three, four, five, six, seven, eight, nine, ten, or more of the sequences delineated in Table 1B column 6, or any combination thereof. Additional, representative examples of polynucleotides of the invention comprise, or alternatively consist of, one, two, three, four, five, six, seven, eight, nine, ten, or more of the complementary strand(s) of the sequences delineated in Table 1B column 6, or any combination thereof. In further embodiments, the above-described polynucleotides of the invention comprise, or alternatively consist of, sequences delineated in Table 1B, column 6, and have a nucleic acid sequence which is different from that of the BAC fragment having the sequence disclosed in SEQ ID NO:B (see Table 1B, column 5). In additional embodiments, the above-described polynucleotides of the invention comprise, or alternatively consist of, sequences delineated in Table 1B, column 6, and have a nucleic acid sequence which is different from that published for the BAC clone identified as BAC ID NO:A (see Table 1B, column 4). In additional embodiments, the above-described polynucleotides of the invention comprise, or alternatively consist of, sequences delineated in Table 1B, column 6, and have a nucleic acid sequence which is different from that contained in the BAC clone identified as BAC ID NO:A (see Table 1B, column 4). Polypeptides encoded by these polynucleotides, other polynucleotides that encode these polypeptides, and antibodies that bind these polypeptides are also encompassed by the invention. Additionally, fragments and variants of the above-described polynucleotides and polypeptides are also encompassed by the invention.

[0080] Further, representative examples of polynucleotides of the invention comprise, or alternatively consist of, one, two, three, four, five, six, seven, eight, nine, ten, or more of the sequences delineated in column 6 of Table 1B which correspond to the same Clone ID NO:Z (see Table 1B, column 1), or any combination thereof. Additional, representative examples of polynucleotides of the invention comprise, or alternatively consist of, one, two, three, four, five, six, seven, eight, nine, ten, or more of the complementary strand(s) of the sequences delineated in column 6 of Table 1B which correspond to the same Clone ID NO:Z (see Table 1B, column 1), or any combination thereof. In further embodiments, the above-described polynucleotides of the invention comprise, or alternatively consist of, sequences delineated in column 6 of Table 1B which correspond to the same Clone ID NO:Z (see Table 1B, column 1) and have a nucleic acid sequence which is different from that of the BAC fragment having the sequence disclosed in SEQ ID NO:B (see Table 1B, column 5). In additional embodiments, the above-described polynucleotides of the invention comprise, or alternatively consist of, sequences delineated in column 6 of Table 1B which correspond to the same Clone ID NO:Z (see Table 1B, column 1) and have a nucleic acid sequence which is different from that published for the BAC clone identified as BAC ID NO:A (see Table 1B, column 4). In additional embodiments, the above-described polynucleotides of the invention comprise, or alternatively consist of, sequences delineated in column 6 of Table 1B which correspond to the same Clone ID NO:Z (see Table 1B, column 1) and have a nucleic acid sequence which is different from that contained in the BAC clone identified as BAC ID NO:A (see Table 1B, column 4). Polypeptides encoded by these polynucleotides, other polynucleotides that encode these polypeptides, and antibodies that bind these polypeptides are also encompassed by the invention. Additionally, fragments and variants of the above-described polynucleotides and polypeptides are also encompassed by the invention.

[0081] Further, representative examples of polynucleotides of the invention comprise, or alternatively consist of, one, two, three, four, five, six, seven, eight, nine, ten, or more of the sequences delineated in column 6 of Table 1B which correspond to the same contig sequence identifer SEQ ID NO:X (see Table 1B, column 2), or any combination thereof. Additional, representative examples of polynucleotides of the invention comprise, or alternatively consist of, one, two, three, four, five, six, seven, eight, nine, ten, or more of the complementary strand(s) of the sequences delineated in column 6 of Table 1B which correspond to the same contig sequence identifer SEQ ID NO:X (see Table 1B, column 2), or any combination thereof. In further embodiments, the above-described polynucleotides of the invention comprise, or alternatively consist of, sequences delineated in column 6 of Table 1B which correspond to the same contig sequence identifer SEQ ID NO:X (see Table 1B, column 2) and have a nucleic acid sequence which is different from that of the BAC fragment having the sequence disclosed in SEQ ID NO:B (see Table 1B, column 5). In additional embodiments, the above-described polynucleotides of the invention comprise, or alternatively consist of, sequences delineated in column 6 of Table 1B which correspond to the same contig sequence identifer SEQ ID NO:X (see Table 1B, column 2) and have a nucleic acid sequence which is different from that published for the BAC clone identified as BAC ID NO:A (see Table 1B, column 4). In additional embodiments, the above-described polynucleotides of the invention comprise, or alternatively consist of, sequences delineated in column 6 of Table 1B which correspond to the same contig sequence identifer SEQ ID NO:X (see Table 1B, column 2) and have a nucleic acid sequence which is different from that contained in the BAC clone identified as BAC ID NO:A (See Table 1B, column 4). Polypeptides encoded by these polynucleotides, other polynucleotides that encode these polypeptides, and antibodies that bind these polypeptides are also encompassed by the invention. Additionally, fragments and variants of the above-described polynucleotides and polypeptides are also encompassed by the invention.

[0082] Moreover, representative examples of polynucleotides of the invention comprise, or alternatively consist of, one, two, three, four, five, six, seven, eight, nine, ten, or more of the sequences delineated in the same row of Table 1B column 6, or any combination thereof. Additional, representative examples of polynucleotides of the invention comprise, or alternatively consist of, one, two, three, four, five, six, seven, eight, nine, ten, or more of the complementary strand(s) of the sequences delineated in the same row of Table 1B column 6, or any combination thereof. In preferred embodiments, the polynucleotides of the invention comprise, or alternatively consist of, one, two, three, four, five, six, seven, eight, nine, ten, or more of the complementary strand(s) of the sequences delineated in the same row of Table 1B column 6, wherein sequentially delineated sequences in the table (i.e. corresponding to those exons located closest to each other) are directly contiguous in a 5′ to 3′ orientation. In further embodiments, above-described polynucleotides of the invention comprise, or alternatively consist of, sequences delineated in the same row of Table 1B, column 6, and have a nucleic acid sequence which is different from that of the BAC fragment having the sequence disclosed in SEQ ID NO:B (see Table 1B, column 5). In additional embodiments, the above-described polynucleotides of the invention comprise, or alternatively consist of, sequences delineated in the same row of Table 1B, column 6, and have a nucleic acid sequence which is different from that published for the BAC clone identified as BAC ID NO:A (see Table 1B, column 4). In additional embodiments, the above-described polynucleotides of the invention comprise, or alternatively consist of, sequences delineated in the same row of Table 1B, column 6, and have a nucleic acid sequence which is different from that contained in the BAC clone identified as BAC ID NO:A (see Table 1B, column 4). Polypeptides encoded by these polynucleotides, other polynucleotides that encode these polypeptides, and antibodies that bind these polypeptides are also encompassed by the invention.

[0083] In additional specific embodiments, polynucleotides of the invention comprise, or alternatively consist of, one, two, three, four, five, six, seven, eight, nine, ten, or more of the sequences delineated in column 6 of Table 1B, and the polynucleotide sequence of SEQ ID NO:X (e.g., as defined in Table 1B, column 2) or fragments or variants thereof. Polypeptides encoded by these polynucleotides, other polynucleotides that encode these polypeptides, and antibodies that bind these polypeptides are also encompassed by the invention.

[0084] In additional specific embodiments, polynucleotides of the invention comprise, or alternatively consist of, one, two, three, four, five, six, seven, eight, nine, ten, or more of the sequences delineated in column 6 of Table 1B which correspond to the same Clone ID NO:Z (see Table 1B, column 1), and the polynucleotide sequence of SEQ ID NO:X (e.g., as defined in Table 1A or 1B) or fragments or variants thereof. In preferred embodiments, the delineated sequence(s) and polynucleotide sequence of SEQ ID NO:X correspond to the same Clone ID NO:Z. Polypeptides encoded by these polynucleotides, other polynucleotides that encode these polypeptides, and antibodies that bind these polypeptides are also encompassed by the invention.

[0085] In further specific embodiments, polynucleotides of the invention comprise, or alternatively consist of, one, two, three, four, five, six, seven, eight, nine, ten, or more of the sequences delineated in the same row of column 6 of Table 1B, and the polynucleotide sequence of SEQ ID NO:X (e.g., as defined in Table 1A or 1B) or fragments or variants thereof. In preferred embodiments, the delineated sequence(s) and polynucleotide sequence of SEQ ID NO:X correspond to the same row of column 6 of Table 1B. Polypeptides encoded by these polynucleotides, other polynucleotides that encode these polypeptides, and antibodies that bind these polypeptides are also encompassed by the invention.

[0086] In additional specific embodiments, polynucleotides of the invention comprise, or alternatively consist of a polynucleotide sequence in which the 3′ 10 polynucleotides of one of the sequences delineated in column 6 of Table 1B and the 5′ 10 polynucleotides of the sequence of SEQ ID NO:X are directly contiguous. Nucleic acids which hybridize to the complement of these 20 contiguous polynucleotides under stringent hybridization conditions or alternatively, under lower stringency conditions, are also encompassed by the invention. Polypeptides encoded by these polynucleotides and/or nucleic acids, other polynucleotides and/or nucleic acids that encode these polypeptides, and antibodies that bind these polypeptides are also encompassed by the invention. Additionally, fragments and variants of the above-described polynucleotides, nucleic acids, and polypeptides are also encompassed by the invention.

[0087] In additional specific embodiments, polynucleotides of the invention comprise, or alternatively consist of, a polynucleotide sequence in which the 3′ 10 polynucleotides of one of the sequences delineated in column 6 of Table 1B and the 5′ 10 polynucleotides of a fragment or variant of the sequence of SEQ ID NO:X are directly contiguous Nucleic acids which hybridize to the complement of these 20 contiguous polynucleotides under stringent hybridization conditions or alternatively, under lower stringency conditions, are also encompassed by the invention. Polypeptides encoded by these polynucleotides and/or nucleic acids, other polynucleotides and/or nucleic acids encoding these polypeptides, and antibodies that bind these polypeptides are also encompassed by the invention. Additionally, fragments and variants of the above-described polynucleotides, nucleic acids, and polypeptides are also encompassed by the invention.

[0088] In specific embodiments, polynucleotides of the invention comprise, or alternatively consist of, a polynucleotide sequence in which the 3′ 10 polynucleotides of the sequence of SEQ ID NO:X and the 5′ 10 polynucleotides of the sequence of one of the sequences delineated in column 6 of Table 1B are directly contiguous. Nucleic acids which hybridize to the complement of these 20 contiguous polynucleotides under stringent hybridization conditions or alternatively, under lower stringency conditions, are also encompassed by the invention. Polypeptides encoded by these polynucleotides and/or nucleic acids, other polynucleotides and/or nucleic acids encoding these polypeptides, and antibodies that bind these polypeptides are also encompassed by the invention. Additionally, fragments and variants of the above-described polynucleotides, nucleic acids, and polypeptides are also encompassed by the invention.

[0089] In specific embodiments, polynucleotides of the invention comprise, or alternatively consist of, a polynucleotide sequence in which the 3′ 10 polynucleotides of a fragment or variant of the sequence of SEQ ID NO:X and the 5′ 10 polynucleotides of the sequence of one of the sequences delineated in column 6 of Table 1B are directly contiguous. Nucleic acids which hybridize to the complement of these 20 contiguous polynucleotides under stringent hybridization conditions or alternatively, under lower stringency conditions, are also encompassed by the invention. Polypeptides encoded by these polynucleotides and/or nucleic acids, other polynucleotides and/or nucleic acids encoding these polypeptides, and antibodies that bind these polypeptides are also encompassed by the invention. Additionally, fragments and variants of the above-described polynucleotides, nucleic acids, and polypeptides, are also encompassed by the invention.

[0090] In further specific embodiments, polynucleotides of the invention comprise, or alternatively consist of, a polynucleotide sequence in which the 3′ 10 polynucleotides of one of the sequences delineated in column 6 of Table 1B and the 5′ 10 polynucleotides of another sequence in column 6 are directly contiguous. Nucleic acids which hybridize to the complement of these 20 contiguous polynucleotides under stringent hybridization conditions or alternatively, under lower stringency conditions, are also encompassed by the invention. Polypeptides encoded by these polynucleotides and/or nucleic acids, other polynucleotides and/or nucleic acids encoding these polypeptides, and antibodies that bind these polypeptides are also encompassed by the invention. Additionally, fragments and variants of the above-described polynucleotides, nucleic acids, and polypeptides are also encompassed by the invention.

[0091] In specific embodiments, polynucleotides of the invention comprise, or alternatively consist of, a polynucleotide sequence in which the 3′ 10 polynucleotides of one of the sequences delineated in column 6 of Table 1B and the 5′ 10 polynucleotides of another sequence in column 6 corresponding to the same Clone ID NO:Z (see Table 1B, column 1) are directly contiguous. Nucleic acids which hybridize to the complement of these 20 lower stringency conditions, are also encompassed by the invention. Polypeptides encoded by these polynucleotides and/or nucleic acids, other polynucleotides and/or nucleic acids encoding these polypeptides, and antibodies that bind these polypeptides are also encompassed by the invention. Additionally, fragments and variants of the above-described polynucleotides, nucleic acids, and polypeptides are also encompassed by the invention.

[0092] In specific embodiments, polynucleotides of the invention comprise, or alternatively consist of, a polynucleotide sequence in which the 3′ 10 polynucleotides of one sequence in column 6 corresponding to the same contig sequence identifer SEQ ID NO:X (see Table 1B, column 2) are directly contiguous. Nucleic acids which hybridize to the complement of these 20 contiguous polynucleotides under stringent hybridization conditions or alternatively, under lower stringency conditions, are also encompassed by the invention. Polypeptides encoded by these polynucleotides and/or nucleic acids, other polynucleotides and/or nucleic acids encoding these polypeptides, and antibodies that bind these polypeptides are also encompassed by the invention. Additionally, fragments and variants of the above-described polynucleotides, nucleic acids, and polypeptides are also encompassed by the invention.

[0093] In specific embodiments, polynucleotides of the invention comprise, or alternatively consist of a polynucleotide sequence in which the 3′ 10 polynucleotides of one of the sequences delineated in column 6 of Table 1B and the 5′ 10 polynucleotides of another sequence in column 6 corresponding to the same row are directly contiguous. In preferred embodiments, the 3′ 10 polynucleotides of one of the sequences delineated in column 6 of Table 1B is directly contiguous with the 5′ 10 polynucleotides of the next sequential exon delineated in Table 1B, column 6. Nucleic acids which hybridize to the complement of these 20 contiguous polynucleotides under stringent hybridization conditions or alternatively, under lower stringency conditions, are also encompassed by the invention. Polypeptides encoded by these polynucleotides and/or nucleic acids, other polynucleotides and/or nucleic acids encoding these polypeptides, and antibodies that bind these polypeptides are also encompassed by the invention. Additionally, fragments and variants of the above-described polynucleotides, nucleic acids, and polypeptides are also encompassed by the invention.

[0094] Many polynucleotide sequences, such as EST sequences, are publicly available and accessible through sequence databases and may have been publicly available prior to conception of the present invention. Preferably, such related polynucleotides are specifically excluded from the scope of the present invention. Accordingly, for each contig sequence (SEQ ID NO:X) listed in the third column of Table 1A, preferably excluded are one or more polynucleotides comprising a nucleotide sequence described by the general formula of a-b, where a is any integer between 1 and the final nucleotide minus 15 of SEQ ID NO:X, b is an integer of 15 to the final nucleotide of SEQ ID NO:X, where both a and b correspond to the positions of nucleotide residues shown in SEQ ID NO:X, and where b is greater than or equal to a+14. More specifically, preferably excluded are one or more polynucleotides comprising a nucleotide sequence described by the general formula of a-b, where a and b are integers as defined in columns 4 and 5, respectively, of Table 3. In specific embodiments, the polynucleotides of the invention do not consist of at least one, two, three, four, five, ten, or more of the specific polynucleotide sequences referenced by the Genbank Accession No. as disclosed in column 6 of Table 3 (including for example, published sequence in connection with a particular BAC clone). In further embodiments, preferably excluded from the invention are the specific polynucleotide sequence(s) contained in the clones corresponding to at least one, two, three, four, five, ten, or more of the available material having the accession numbers identified in the sixth column of this Table (including for example, the actual sequence contained in an identified BAC clone). In no way is this listing meant to encompass all of the sequences which may be excluded by the general formula, it is just a representative example. All references available through these accessions are hereby incorporated by reference in their entirety.

TABLE 3

| Clone ID NO: | SEQ ID | Contig | EST Disclaimer | | |
|---|---|---|---|---|---|
| Z | NO: X | ID: | Range of a | Range of b | Accession #'s |
| HCNAC10 | 11 | 968738 | 1-269 | 15-283 | AA327049, AA327048, AI821708, and AA584428. |
| HCNAG07 | 12 | 954493 | 1-317 | 15-331 | AA327124, and AA326960. |
| HCNAK56 | 13 | 832249 | 1-243 | 15-257 | AA327304. |
| HCNAL66 | 14 | 832247 | 1-654 | 15-668 | AI307359, AI034463, AI831739, AI335097, AA970710, AI003652, |
| | | | | | AI221942, N52528, AA854422, AI022540, AI301777, and U10994. |
| HCNAN69 | 15 | 655816 | 1-304 | 15-318 | AA327349, and AA327350. |
| HCNAO20 | 16 | 832251 | 1-321 | 15-335 | AA327061, R11625, and H93223. |
| HCNAR21 | 17 | 948746 | 1-418 | 15-432 | AA327375, and AA327513. |
| HCNAX26 | 18 | 832250 | 1-248 | 15-262 | |
| HCNCF73 | 19 | 762056 | 1-306 | 15-320 | AI027472. |
| HCNCH64 | 20 | 922009 | 1-299 | 15-313 | |
| HCNCN84 | 21 | 766990 | 1-258 | 15-272 | |
| HCNCQ79 | 22 | 832242 | 1-503 | 15-517 | AA327038. |
| HCNCU02 | 23 | 918993 | 1-251 | 15-265 | F24030, and AC005971. |
| HCNCV19 | 24 | 832221 | 1-438 | 15-452 | AA327209, and AC008372. |
| HCNCY39 | 25 | 960373 | 1-298 | 15-312 | AC004874. |
| HCNDB53 | 26 | 832225 | 1-389 | 15-403 | AA327062. |
| HCNDD83 | 27 | 832230 | 1-259 | 15-273 | |
| HCNDF20 | 28 | 669111 | 1-245 | 15-259 | |
| HCNDG69 | 29 | 666726 | 1-387 | 15-401 | D31061, R70450, and AL080250. |
| HCNDH18 | 30 | 832215 | 1-269 | 15-283 | AA327490. |
| HCNDI01 | 31 | 832213 | 1-324 | 15-338 | AA327395. |
| HCNDL91 | 32 | 832209 | 1-332 | 15-346 | AA715255, AA715267, AL048925, AC002091, AC007308, AC002470, |
| | | | | | AL080243, AL139054, AP000346, AC002544, AL022722, AC003695, |
| | | | | | Z95152, AC007193, and Y07848. |
| HCNDN43 | 33 | 832212 | 1-286 | 15-300 | |
| HCNDQ50 | 34 | 723976 | 1-379 | 15-393 | |
| HCNDV42 | 35 | 927262 | 1-417 | 15-431 | |
| HCNSM15 | 36 | 914484 | 1-397 | 15-411 | H95975, AW392026, AW391990, N31464, and AW365086. |
| HCNSP37 | 37 | 655829 | 1-253 | 15-267 | |
| HCNSQ03 | 38 | 832200 | 1-357 | 15-371 | AC005046. |
| HCNUA60 | 39 | 695786 | 1-250 | 15-264 | R24685, AA469072, AA935534, T50287, AA887381, AI538082, |
| | | | | | AA809455, AA532665, AA970480, AA833673, AA809439, AA018103, |
| | | | | | AI419770, AA059058, AA838000, AI654089, AI784506, AA904689, |
| | | | | | AA575958, AI083552, AI806808, AI261311, AI580662, AA887119, |
| | | | | | AI268976, AA971980, AI361312, N58823, AA088862, N40196, |
| | | | | | AA019739, AA906201, AW189948, AW009062, AI188971, AI751250, |
| | | | | | AI186697, AA610052, AI310126, AI684587, AI189791, AW440198, |
| | | | | | AW264561, H86494, AI800634, AA886637, T47520, AI971218, H86061, |
| | | | | | AF113127, AF151877, AL117550, and AF161526. |
| HCNUA84 | 40 | 522523 | 1-339 | 15-353 | AL035693. |
| HOCNE77 | 41 | 832202 | 1-291 | 15-305 | AW291582, AW295479, AI380340, AI688604, AI660552, AI688540, |
| | | | | | AW006764, AW296326, AW004785, AA594441, AI700219, AI659950, |
| | | | | | AA470898, AA522452, AA594533, AI695451, AI581787, AI581803, and |
| | | | | | AI832419. |
| HWLAL74 | 42 | 761974 | 1-288 | 15-302 | |
| HWLBI74 | 43 | 839518 | 1-422 | 15-436 | AL035425. |
| HWLBK76 | 44 | 731099 | 1-515 | 15-529 | AA193193, and AI609548. |
| HWLBK80 | 45 | 933865 | 1-534 | 15-548 | D42047. |
| HWLED58 | 46 | 830330 | 1-431 | 15-445 | |
| HWLEF86 | 47 | 785193 | 1-138 | 15-152 | |
| HWLEH06 | 48 | 934649 | 1-542 | 15-556 | |
| HWLEI16 | 49 | 729050 | 1-316 | 15-330 | |
| HWLEJ07 | 50 | 952396 | 1-396 | 15-410 | AB023217. |
| HWLEK39 | 51 | 918545 | 1-359 | 15-373 | AI823397, and AI817711. |
| HWLEN08 | 52 | 958509 | 1-1758 | 15-1772 | AI655644, AW327476, AI031969, AI205174, AI188440, AW119015, |
| | | | | | AW004593, AI863261, AA594110, AI346704, AI090352, AW361848, |
| | | | | | AW117393, AI148841, AW084108, AW327477, AI613225, AI192097, |
| | | | | | AA598697, AW130228, AW005953, T80227, AW195717, AA442259, |
| | | | | | AA883126, AA160298, AA456223, W86369, AA291990, AI360945, |
| | | | | | AI916226, AA047326, N68259, AI587282, AA831041, AI028392, |
| | | | | | AA411013, W40265, H94896, AA923081, W86305, W26837, AI680635, |
| | | | | | AA836337, W40218, AW205315, AA568678, AA781825, AA293214, |
| | | | | | AI356302, R96627, AA055222, AA226768, AA442258, T62832, H86977, |
| | | | | | N80952, AA770355, Z45232, H86512, H85815, R59107, AA552570, |
| | | | | | AA192495, R59108, AA666262, R96669, AA160234, AA191312, |
| | | | | | AI216152, AA190905, H91048, AA772996, H86978, AI139475, |
| | | | | | AA341301, AI016968, N26373, H86974, AI439636, AA130830, |
| | | | | | AI041372, AA375826, H85352, H91340, H54207, H86979, H54206, |
| | | | | | Z42208, H86975, N56352, R64241, AI004396, AI560452, AI125549, |
| | | | | | H86489, AA368539, H63675, T62681, AA227002, AW238831, |
| | | | | | AA883749, AW292020, R77078, AI694430, H86976, AA580656, |
| | | | | | AA380444, AA846465, F08344, and AI561352. |
| HWLEN20 | 53 | 963418 | 1-423 | 15-437 | |
| HWLEO59 | 54 | 974078 | 1-390 | 15-404 | AA773463, AI634187, AA828637, AW069227, AI457313, AW023111, |
| | | | | | AI216990, AW338035, AW338021, AI791211, AI821947, AA804943, |
| | | | | | AI753267, AI636341, AI243789, AA630854, AI216151, AI755214, |
| | | | | | AI754567, AW245354, AA284247, AI493587, AA086318, AI889579, |
| | | | | | AI554807, AA502532, AA515728, AA757426, AI754105, AA634991, |
| | | | | | AI356440, AA456924, AI206841, AI884340, AA501461, AW272294, |
| | | | | | AI249365, AI249688, AI568683, AA225406, R92658, W02749, |
| | | | | | AI038304, AA775205, AI445216, AW151201, AI537800, AI821382, |
| | | | | | AI224619, AL042373, AA557911, AI961983, AA535216, AI821931, |
| | | | | | AI417469, AI569100, AA857812, R34070, AI189682, AA832145, |
| | | | | | AW192599, AW083678, AI278972, AI199816, AI292236, AA626829, |
| | | | | | AI205181, AL118925, AA609834, AI049709, H73550, AA573127, |
| | | | | | AI912401, AI187148, AA491767, AA297195, AI538236, AL042771, |
| | | | | | AW303872, AI620992, AI799569, AL042906, AW002831, T47138, |
| | | | | | AA054156, AW151870, AL119838, AC004590, AC005736, AC005225, |
| | | | | | AC005071, AC005015, AP000114, AC005409, AC004491, AC006312, |
| | | | | | AD000092, AC007277, AC005778, AC010205, Z83844, AC002511, |
| | | | | | AC005972, Z83847, AC004686, AL034423, AC007011, AL021453, |
| | | | | | AL049795, AC007227, AL080243, AL035410, AP000046, AP000553, |
| | | | | | AC007664, AC004673, AC007371, AC005305, AC005049, AC007040, |
| | | | | | AC006121, AC005529, AD000685, AL110502, AC009247, AC002404, |
| | | | | | AL117694, AP000509, Z84466, U91326, AP000510, AC005971, |
| | | | | | AL133246, AC006441, AC004953, AL022313, AF047825, AC004862, |
| | | | | | AL049830, AC003982, U95742, AL133448, AC004890, AC007283, |
| | | | | | AC003112, Z83308, AC007216, AL035071, AP000113, AP000045, |
| | | | | | AL139054, AL035530, AF118808, AL096766, AC006057, AC002425, |
| | | | | | AC005899, AP000356, AL049569, AC002316, AC006211, AC004787, |
| | | | | | AF031078, AL133245, AC004983, AC006965, AC006511, AL035419, |
| | | | | | AC004834, AC006942, Z86090, AC004231, D84394, AF030876, |
| | | | | | AC002472, AL033527, AC004125, U47924, AC005539, AP000557, |
| | | | | | AC002470, AL109801, AL132712, AL121748, AF207550, AL031846, |
| | | | | | AC004583, AC004854, AL022320, U63721, AC005324, AC007193, |
| | | | | | AC004019, AC005280, AL109984, AC007421, AC002997, AC005317, |
| | | | | | X54156, U94788, AF165926, AC002477, AC003046, AC006088, |
| | | | | | AP000302, AC007731, AL031848, AC007052, AC005500, AC004647, |
| | | | | | AL133382, AC003043, Z95331, AF053356, AC006930, AC004596, |
| | | | | | AC007690, AC003101, AC005488, Y14768, AF134726, AL021707, |
| | | | | | AC005399, AC006271, AC003963, AL022721, AC006285, AC009516, |
| | | | | | U80017, AL035422, AC005031, AB023060, AC004185, AC005231, |
| | | | | | AC006449, AC004195, AL135960, AJ131016, AP000505, AC005081, |
| | | | | | AC005527, L44140, AF001549, AC006241, AC004966, AC004882, |
| | | | | | AL049692, AL049766, X87344, AC003682, AC007041, AL050350, |
| | | | | | AC005057, AC005274, AL020993, AC003007, AC004905, U91321, |
| | | | | | AL049757, AC005200, AC005823, Z98048, AC006317, AC005566, |
| | | | | | AC005261, AL109963, AF129756, AC003663, AC004655, AC004002, |
| | | | | | AF050154, AC007666, L78833, AC004067, AC007792, AC005338, |
| | | | | | AC005288, AC002544, AL033397, AC004805, AL109798, AP000688, |
| | | | | | AC002347, AC007435, AL023807, AC006275, AC008018, AP000269, |
| | | | | | AL035249, AC002040, AC002310, AC005041, AP000556, AL096701, |
| | | | | | AC000052, AP000103, AC002300, AC005664, AC005921, AR036572, |
| | | | | | U91328, AC005520, AC002288, AL049539, AC015853, Z93023, |
| | | | | | AC006071, AC005216, AC003119, AP000032, Z93017, AL133445, |
| | | | | | AL034402, AC007686, AJ251973, AL049712, AC005514, AP000500, |
| | | | | | Z82244, AL020997, AL031670, AC005632, AC004878, AC002375, |
| | | | | | AC007388, Z97630, AC005358, AC007304, Z82182, AC007308, |
| | | | | | AL022326, Z98200, AC004099, AC005800, AP000501, AC005005, and |
| | | | | | AC004771. |
| HWLEP95 | 55 | 751199 | 1-475 | 15-489 | |
| HWLEQ36 | 56 | 966250 | 1-437 | 15-451 | |
| HWLEQ81 | 57 | 934224 | 1-210 | 15-224 | AA625092, and AL022328. |
| HWLER88 | 58 | 915168 | 1-320 | 15-334 | |
| HWLFB08 | 59 | 849136 | 1-580 | 15-594 | AL133245, AL133243, and Y17267. |
| HWLFC80 | 60 | 830279 | 1-571 | 15-585 | |
| HWLFE50 | 61 | 830283 | 1-580 | 15-594 | AW085982, AI521525, AI269608, AW020150, AI926102, AW151541, |
| | | | | | AI537368, AL041375, AI452836, AA484892, AW275432, AA535216, |
| | | | | | AW117860, AI797998, AI927275, AI755214, AI754567, AA487569, |
| | | | | | AA302979, AI984168, AI049845, AI754105, AI004591, AI801563, |
| | | | | | AI587349, AI249688, AI751341, AI884383, AI921706, AA644090, |
| | | | | | AA456924, AI355246, AA610381, AW003886, R94909, AI753904, |
| | | | | | AI697235, AA610433, AI434653, AI973173, AA410788, AA086318, |
| | | | | | AW151247, AI697239, AW021917, AI862716, AI697242, AI568376, |
| | | | | | AA833896, AA669234, AW104161, AI446623, AA228778, AI141130, |
| | | | | | AW057760, AA833875, AA703818, AA846923, AI421257, AA761623, |
| | | | | | AW277174, AI357762, AI291037, AW270768, AI915081, AW083678, |
| | | | | | AA643441, AC007617, AC007216, U95742, U95739, AC007537, |
| | | | | | AP000032, AC006511, AC007226, M63543, AC006965, AC006455, |
| | | | | | AC005288, AC007563, M63544, AC005529, AC012085, AC004020, |
| | | | | | AC005839, AC006449, AC009516, AP000689, Z85987, AL023575, |
| | | | | | AL049776, AC007450, AP000350, AC005082, AP000501, AL050307, |
| | | | | | Z97054, AC006530, AC005971, AC002544, AC005755, AC005231, |
| | | | | | U91326, AC005911, AL109963, AC007327, AC007664, AL078581, |
| | | | | | AC005015, AC004526, Z82203, AC007406, AC009509, AC007225, |
| | | | | | AC004491, AC006312, AP000556, AL035587, AC005527, U91318, |
| | | | | | AC004236, AC005332, AL096791, AC005377, AL022302, AC002310, |
| | | | | | AL132712, AP000692, AC002126, AC006946, AC005736, Z93020, |
| | | | | | Z83844, AL109758, AC002477, AP000502, AC007308, AL031427, |
| | | | | | AL024474, Z93241, AC005399, AL024498, AC007227, AC002472, |
| | | | | | AP000252, AL109798, AP000103, AC006285, Z98884, AL133163, |
| | | | | | Y18000, AC002350, AL049872, AP000558, AC005484, AF003626, |
| | | | | | AC005669, AC003043, AF196969, AC004805, AF053356, Z83840, |
| | | | | | AL022165, AC004383, AC005081, AC004522, AC006241, AC006141, |
| | | | | | AC004033, AC000025, AP000046, AL009179, AC007676, AC006011, |
| | | | | | AC004106, AC006026, Z84487, AC004962, AL022238, AL022311, |
| | | | | | U78027, AC005261, AL021707, AC006509, Z99716, AL121603, Z98742, |
| | | | | | AC005701, AL023656, AC005740, U85195, AC005694, AP000065, |
| | | | | | AL050318, AC005412, AC002369, AC005324, AL031311, AL096763, |
| | | | | | AC004771, AC005696, U95743, AF111169, AC004148, Z93023, |
| | | | | | AE000658, AL135744, AC006441, AC005726, AC007637, Z96074, |
| | | | | | AC007358, AC005037, AF196779, AC004991, AC005500, AC003085, |
| | | | | | AP000500, AC007041, AL133448, AC005562, AC005920, AC002425, |
| | | | | | AL022323, AC006840, AL109801, AC005041, AC005668, AL035555, |
| | | | | | AL117337, AL121653, Z84469, AC005089, AP000555, AC005899, |
| | | | | | AL031053, AC002420, AF165926, AC006538, AC006111, AC002492, |
| | | | | | AC002319, AL049569, AC003663, AC007546, U52112, AC003035, |
| | | | | | AC000353, AC005358, AC005829, AC003657, U95740, AC002511, |
| | | | | | AC003029, AC008085, AC005229, AC002470, AC007066, AC004895, |
| | | | | | AL050333, U82828, AP000553, AC006023, AL022329, AC005076, |
| | | | | | AL049538, AP000270, AC005365, AL031681, AC006079, AC007201, |
| | | | | | AC004552, AF207550, AC003982, Z84466, AF205588, AC003006, |
| | | | | | AC005537, AC006101, AC007536, AP000031, AC004865, AL020997, |
| | | | | | AL031848, AL022327, AL133245, AC020663, AL050321, AC002456, |
| | | | | | AC003108, AL031662, AC004834, AP000159, AJ003147, AL117354, |
| | | | | | AC005338, U96629, AL121658, AC005531, AF045555, AC006211, |
| | | | | | AL022326, AL080243, AC008041, AC005088, AC003992, AP001053, |
| | | | | | AC004841, AC005245, AP000550, Z86090, AL024507, AF031078, |
| | | | | | AC006571, and AC005049. |
| HWLFF40 | 62 | 830287 | 1-286 | 15-300 | AC005751. |
| HWLFF62 | 63 | 915155 | 1-437 | 15-451 | |
| HWLFH47 | 64 | 719752 | 1-467 | 15-481 | Z99396, AW392670, AW372827, AW384394, AW363220, AL119355, |
| | | | | | AL119341, AL119497, AL119319, AL042551, AL119457, AL119324, |
| | | | | | AL119396, U46341, AL119443, AL119484, AL119363, AL119391, |
| | | | | | AL119522, AL119483, AL119335, AL119496, U46351, U46349, |
| | | | | | AL036418, AL038837, U46346, AL119399, AL134902, U46350, U46347, |
| | | | | | AL134528, AL037051, AL119444, AL036725, AA631969, AL119418, |
| | | | | | AL134518, AL042614, AL037205, AL119439, AL042433, AL042984, |
| | | | | | AL042975, AL036858, AL042965, AL134920, AL119401, U46345, |
| | | | | | AL134536, AL043008, AL042450, AL134525, AL134538, AI142131, |
| | | | | | AL039074, AL036924, AL042970, AL042544, AL043019, AL039912, |
| | | | | | AL043029, AL119488, AL042542, AL038509, AL043003, AL119464, |
| | | | | | AL037085, AL037094, AL037082, AL037526, AL036196, AL036190, |
| | | | | | AL037639, AL037077, AL036767, AL038520, AL036268, AL036998, |
| | | | | | AL038851, AL036733, AL037027, AL037615, A81671, AR060234, |
| | | | | | AR066494, AR054110, AB026436, AR023813, AR064707, and |
| | | | | | AR069079. |
| HWLFJ51 | 65 | 853602 | 1-328 | 15-342 | |
| HWLFK50 | 66 | 918539 | 1-288 | 15-302 | AA131248, and AI288287. |
| HWLFO70 | 67 | 756554 | 1-389 | 15-403 | AC005595, U47924, AC005531, AP000347, and AC005754. |
| HWLFO82 | 68 | 779461 | 1-494 | 15-508 | |
| HWLFO92 | 69 | 791052 | 1-577 | 15-591 | |
| HWLFP37 | 70 | 708985 | 1-598 | 15-612 | AI284640, AL046409, AW327868, AA584145, AI754955, AI431303, |
| | | | | | AI963720, AA490183, AL044858, AL119691, AA507824, AL037683, |
| | | | | | AW193265, AI334443, AA581903, AA846876, AI270117, AI613280, |
| | | | | | AI281881, AW265385, AW303196, AA521399, AA521323, AA623002, |
| | | | | | AW274349, AA847499, AW301350, AW439558, AI076616, AI350211, |
| | | | | | AA493708, AW270382, AW021583, AA525824, AI345518, AA584201, |
| | | | | | AI754658, H71429, AI499938, AL042753, AA533036, AA126450, |
| | | | | | AA613232, AA984708, AW274346, AA682912, AA719292, AI110770, |
| | | | | | AA503473, AA502104, AA528516, AA483771, AI110760, AW072923, |
| | | | | | AL042420, AI568678, AA584167, AA632837, AA631507, AI246119, |
| | | | | | AI434695, AI732120, AW080811, AI254615, AA394271, AI860013, |
| | | | | | AI133164, AA613227, AA470969, AA491814, AL038474, AA468131, |
| | | | | | AA649642, AI610159, AW304584, AI536665, AA572713, AA603835, |
| | | | | | AI246796, AA720702, AW073470, AI192631, AI589230, AA780515, |
| | | | | | AI357288, AA177063, AI499503, AA084624, AA469451, AI133297, |
| | | | | | AI801591, AA531372, AA665199, AI561060, AW103758, AW276827, |
| | | | | | AL048626, F36273, AI064864, AA494163, AA713891, AA129446, |
| | | | | | AI312309, AI696955, AI379719, AA602047, AA551503, AA577906, |
| | | | | | AA806796, AA548058, AA828042, AI624097, AI633390, AI368256, |
| | | | | | AA552856, AA552843, W79504, AA214342, AW148792, R88888, |
| | | | | | AI801600, AI564185, AC005529, AC005527, AC007298, AC005694, |
| | | | | | AC006251, AC006312, AC002476, AC003071, AL121748, AL121603, |
| | | | | | AC004854, AL022313, AC004686, Z97054, AB020865, AL109967, |
| | | | | | AC004381, AC004975, AL080243, AP000088, AC004890, AC005837, |
| | | | | | AC006213, AC005772, AC004650, AC002310, Z68870, AL031286, |
| | | | | | AL080250, Z97989, AC006960, AL031311, AC004987, AC007919, |
| | | | | | AL034402, AC008372, Z82976, AC004019, AC002430, AC004859, |
| | | | | | AC004815, AC002425, AL139054, Z98752, AP000557, AC003108, |
| | | | | | AC004755, D87675, AC006211, AL049758, AP000555, AC007384, |
| | | | | | AC016026, AC005412, AC005324, AC005295, AC005751, AC006449, |
| | | | | | AC001231, AC004076, AL049839, AC003048, AC005531, AP000065, |
| | | | | | AL009172, AC007899, AC007731, AL121578, AC003983, AC002045, |
| | | | | | AC005154, AL031584, AC005500, AC005081, AC008115, AL049869, |
| | | | | | AC005037, AL031848, AL080242, AC007216, AC010168, AL023575, |
| | | | | | U47924, AF196971, AP000552, AL021578, AE000658, AC007066, |
| | | | | | AC007790, AC008079, AP000692, AC007688, AC003664, AC005189, |
| | | | | | L44140, AC005562, AC004990, AC007285, AC020663, AC004526, |
| | | | | | U91323, AC002400, AC002059, AL049643, AC000052, U95742, |
| | | | | | AC007563, AC002549, Z86061, AF111168, AL021453, AC005839, |
| | | | | | AC002429, AC005944, AC005520, AF165926, AC005914, AC005180, |
| | | | | | AC006006, AC006450, AC005747, AF001549, AC016830, AB022785, |
| | | | | | U91321, AC004033, AC006111, AC004796, AL136295, AL049759, |
| | | | | | AC005535, AC007283, AP000359, U80017, Z93020, AL008719, |
| | | | | | AC006026, AC004638, AC007032, AL035413, AC006344, AL133245, |
| | | | | | AL031670, AC008012, AC006486, AC010072, U66059, AC005768, |
| | | | | | AC007842, AL031577, AL050318, AC009946, AJ010770, L78833, |
| | | | | | AC005486, AL132985, AP000961, AL121694, AC004933, AC008109, |
| | | | | | Z98051, AL049776, AC006064, AL049709, AC009399, AC000025, |
| | | | | | AC003007, AC006160, AC002307, AC007685, AC005695, AL034554, |
| | | | | | U85195, AL034350, AL049843, AC005300, AC004659, AC004883, |
| | | | | | AF045555, AC002470, AL035659, AC003692, AF053356, AL031118, |
| | | | | | AC005696, AC007051, AD000092, AL121825, AC002347, AC008101, |
| | | | | | AC005632, AC005288, AR036572, U91328, AC003098, AC004522, |
| | | | | | AC007666, AF134726, AJ003147, AC005924, Z98742, AL096701, |
| | | | | | AC010202, AC007226, AC007358, AL008630, AC006512, AC004982, |
| | | | | | AC004972, AC007363, AL031257, AC000066, AL031281, AC004814, |
| | | | | | AC022517, AF064861, AL021707, AL022302, AC006130, AC004893, |
| | | | | | AC005988, AC004811, AC009721, AL049699, AP000501, AL121655, |
| | | | | | AL121653, U62317, AC016831, AL031687, AC005701, AC005740, |
| | | | | | AC006538, AL121652, AC006120, AC007245, AL117258, AC006088, |
| | | | | | AC005829, AF190465, AL022238, AC005104, Z99716, AC003025, |
| | | | | | AL035695, AC002395, AC004865, and Z83844. |
| HWLFP46 | 71 | 882848 | 1-610 | 15-624 | AA167712, AA484145, AI042311, AI251597, AI816141, AA582528, |
| | | | | | AI382825, AI732151, AI355426, AA832175, AL041146, AA663600, |
| | | | | | AI469968, T94249, AC005483, U07563, Z98036, AL031432, AC005089, |
| | | | | | Z99754, AC006335, AL031678, AC004534, Z98884, U95743, AL022336, |
| | | | | | AL050313, AC004045, AC003080, AC005037, U16300, AC002301, |
| | | | | | AC004808, AL022725, AC004890, U52112, AC011311, AL035664, |
| | | | | | AL023582, AC002425, AC005280, U62317, AC005599, I05724, |
| | | | | | AR002329, I08174, A19048, AC005777, Z83820, AL109758, AC008150, |
| | | | | | AL096799, AB020858, AC004584, AL031848, M16553, AB007955, |
| | | | | | AL049553, J02846, AP000310, AB000877, AC004631, Z68870, |
| | | | | | AC005331, AC004559, AC004237, Z82248, AC005776, AC000087, |
| | | | | | AC004144, AC006046, AC005775, AP000148, AL096774, AC005031, |
| | | | | | AC006130, AP000233, AC002369, AC004874, AP000116, AC008116, |
| | | | | | AC004813, AC004997, Z95116, AC002996, AC007243, AL022313, |
| | | | | | AC005155, AC005839, AC004999, U80017, AC006364, AF064861, |
| | | | | | AC002526, AC002563, AC007666, AL009181, AC007388, AC009275, |
| | | | | | AC006502, AC005585, AC004852, AC007462, AL021368, AC000052, |
| | | | | | AC008039, AC003101, AC003684, AC007308, and U66059. |
| HWLFQ48 | 72 | 721154 | 1-243 | 15-257 | |
| HWLFS01 | 73 | 915531 | 1-453 | 15-467 | |
| HWLFS86 | 74 | 830246 | 1-578 | 15-592 | |
| HWLFV61 | 75 | 922924 | 1-135 | 15-149 | |
| HWLFW01 | 76 | 915527 | 1-516 | 15-530 | |
| HWLGL36 | 77 | 806724 | 1-419 | 15-433 | |
| HWLGP10 | 78 | 883139 | 1-306 | 15-320 | |
| HWLGP21 | 79 | 958259 | 1-129 | 15-143 | |
| HWLGR72 | 80 | 958284 | 1-629 | 15-643 | |
| HWLGT12 | 81 | 966044 | 1-358 | 15-372 | AF047825. |
| HWLGX56 | 82 | 830329 | 1-570 | 15-584 | |
| HWLHC73 | 83 | 830319 | 1-551 | 15-565 | |
| HWLHP05 | 84 | 931087 | 1-404 | 15-418 | AW089625, AA577824, AA188940, AI354847, AI679002, AI732911, |
| | | | | | AA309533, Z23155, AA192366, AI243789, AA829044, F33184, |
| | | | | | AW084152, W96277, AA825954, AW265688, AI243793, AI287921, |
| | | | | | AA856815, AA551067, AA640277, AA618453, AA642787, AA371410, |
| | | | | | D51877, AA764812, AA831913, AI114494, F16409, AI862716, |
| | | | | | AA385775, AI028498, AI791390, AA569053, AI185394, AA742815, |
| | | | | | AA226532, AA599080, R67701, AA678472, AI885465, AA654482, |
| | | | | | AA297969, AW304699, AW419389, AL119331, AI929796, AA601673, |
| | | | | | AI174531, AA610255, AA878407, AW243945, T49184, AA572987, |
| | | | | | AA728861, AA558366, AA582746, F26072, N40092, AA493829, |
| | | | | | AW069227, AL120543, AI345497, AI247973, AW068786, AA578535, |
| | | | | | AW338506, AI039257, AA513916, AA320105, AI689198, AL008718, |
| | | | | | AC005071, AP000503, AC004253, AL034417, AC005015, AF134726, |
| | | | | | AP000031, AC004765, AL133448, AC004019, AL022316, AL049697, |
| | | | | | AC002432, AL031682, AC005488, AL031056, AL024498, AC016831, |
| | | | | | AC002565, AC005529, AC004185, AC005081, AF001549, AL022318, |
| | | | | | AC002425, AP000556, Z98946, AC006146, AC005274, Z99128, |
| | | | | | AC002381, AC002094, AL133245, AL121748, AC005696, AL133163, |
| | | | | | AC011331, AL034420, AC005225, AC002312, U91323, Z83845, |
| | | | | | AC006312, Z83844, AC004531, AC005736, AL049832, AC007308, |
| | | | | | AC005527, AF196779, AC002550, AC004996, AC006449, AC006356, |
| | | | | | AL133382, AP000553, Z84487, AC004812, AP000032, AP000509, |
| | | | | | AC007731, AC005730, AC005264, AC005500, AC006130, AL031390, |
| | | | | | AC004167, AP000346, AC007055, U78027, AC005011, AL031311, |
| | | | | | AC004854, AC007057, U91318, AJ246003, AP000557, AC005754, |
| | | | | | U95742, Z84469, AC005678, Z82198, AC003982, AC005180, AF053356, |
| | | | | | AC005776, AC004832, AL109798, AP000135, AL050318, AC005486, |
| | | | | | AC002553, Z68192, AP000555, AC005568, Z98750, AL035422, |
| | | | | | AC009946, Z98052, AC004033, AC005003, AL031663, AP000511, |
| | | | | | D84394, AP000103, AC004067, AC006318, Z82244, AC007216, |
| | | | | | AC002350, AF001550, AC007052, AC004491, AP000075, AL121658, |
| | | | | | AL031846, AC004814, AL080243, AC005023, AC004143, AL020997, |
| | | | | | AL049780, AC005803, AC007899, Z84466, AL132994, AL049779, |
| | | | | | X66401, AF111168, AC005940, AC005971, AL080242, AC004975, |
| | | | | | AC005412, AL034548, AC007387, AC006512, AL021154, AC007360, |
| | | | | | Z98051, AP000252, AC004134, AL109984, AC009464, AC006160, |
| | | | | | AC005004, AJ251973, AC002310, AC007919, AL033518, AC003688, |
| | | | | | AC005200, AC006441, AC006960, AL031984, AC006254, AL022152, |
| | | | | | AF038458, AC004707, Z99127, AL121923, Z97055, AC006080, |
| | | | | | AC003663, AC004834, X87344, AC005808, AC007541, AC003109, |
| | | | | | AC006317, AL022324, AL133312, AL109627, AC005288, Z93023, |
| | | | | | AC006966, AC007686, AP000212, AC005231, AP000493, AC007041, |
| | | | | | AC004209, AF196969, AC005291, AC008171, AL023775, AC012627, |
| | | | | | AL009181, AC002491, AP000114, AC005531, AC005245, AC004805, |
| | | | | | AF064861, AC007312, AC007012, U95740, Z74739, AF091512, |
| | | | | | AL023876, AL021155, AF121781, AL133353, AF048729, AC006285, |
| | | | | | L78810, AC004890, AC002091, AF001552, AC005209, AC004458, |
| | | | | | AC002996, AC002991, AL031678, AC005664, U52112, AP000313, |
| | | | | | AC008372, AC006465, AC006509, AL022311, Z95116, AF047825, |
| | | | | | AC007637, AC006453, AC005306, AC007551, AC005519, AL049745, |
| | | | | | AL031281, AC005355, AL132777, AC005785, AL117328, AC005694, |
| | | | | | AF019413, Z98884, AC006251, AL050321, AP000347, AL135959, |
| | | | | | AC005305, AL022165, AC020663, AC007386, AC006236, AL096774, |
| | | | | | Z98742, and Z73359. |
| HWLHR93 | 85 | 952387 | 1-367 | 15-381 | |
| HWLHT06 | 86 | 934217 | 1-362 | 15-376 | AA507824, AA493708, AW406755, T40452, AA703891, AI365988, |
| | | | | | AW193265, AI284640, F29989, AI554201, AI431303, AA580808, |
| | | | | | AI350211, AI613280, AA467820, AW438643, AL043719, AI583283, |
| | | | | | AL038705, AI270117, AA577906, AA468244, AI610159, AA602047, |
| | | | | | AI619997, AI751216, AW270270, AI559251, AI345654, AW072587, |
| | | | | | AI281881, AA523242, AW148792, AW274346, AI792287, AL037683, |
| | | | | | AW273218, AI969436, AI962050, AA229814, AA483771, AA491284, |
| | | | | | AW276827, AI539563, AI334443, AA720702, R35746, AA584167, |
| | | | | | AI801482, AI754955, AI472222, AA446544, AI537506, AW021583, |
| | | | | | AI085719, AW303196, AW274349, AA621858, AA649781, AW302450, |
| | | | | | AL119691, AA653618, AI589461, AI375542, AI282511, AA555141, |
| | | | | | AI254615, AA552856, AI863054, AI917271, AI439210, AA552843, |
| | | | | | AA908468, AL041690, AW301350, AI732120, AA533725, AA857486, |
| | | | | | AI286356, AI625647, AL048925, AA507547, AI702314, AI355206, |
| | | | | | AI053672, AI634384, AW440545, AI357288, AL046898, AW149339, |
| | | | | | AI338350, AA847952, AA579366, AA493621, N53150, AI733755, |
| | | | | | AI963720, AW238278, AA629992, AI192631, AA856954, AA630925, |
| | | | | | AA177061, AA551503, AA581903, AA722372, AA490183, AW276435, |
| | | | | | AW087356, AI696962, AW238542, AW028429, AA653375, AA631507, |
| | | | | | AI149478, AI251436, AW406447, AI307608, AW008952, AW071196, |
| | | | | | AA856848, AW408047, AW085780, AA225944, F28204, AA639248, |
| | | | | | AA513141, AW194250, AI583612, AW088846, AA468022, AW079135, |
| | | | | | AI568678, AA548058, AI744826, AF034184, AW341900, AA521323, |
| | | | | | AA092078, AA492166, AA584082, AA610491, AA502104, AA747105, |
| | | | | | AA586458, AA665330, AW080125, AL046205, AA559290, AI281903, |
| | | | | | AI954260, AI744995, AA533036, H95681, AA623002, AA521399, |
| | | | | | AA747276, AI250019, AI860013, AA661948, AA581463, AA470969, |
| | | | | | AI355224, AA610271, AW327868, AA503473, AI633025, AI624097, |
| | | | | | AW238583, AA502155, AA482681, AA526758, AA484696, AW419262, |
| | | | | | X75335, X55930, D83989, M37551, Z79422, U57005, U67827, X54181, |
| | | | | | X55923, X54178, U18391, U18392, U57006, U18395, U18394, X55925, |
| | | | | | X54179, U18390, U67829, X55932, X55926, U57009, X55927, U57008, |
| | | | | | I51997, AF077058, L47228, X55929, X55933, U18399, U18398, X53550, |
| | | | | | X54175, U67831, AC004890, AC007676, AC005954, AF015153, U57007, |
| | | | | | AC005777, U18400, AL117337, X55922, U67825, U18388, M87919, |
| | | | | | U18387, U67801, U18396, U18389, U67826, U14705, AP000555, |
| | | | | | AC005726, X54177, AP001037, AC005089, U14701, AC005940, |
| | | | | | AL021155, Z78627, AL021546, AF176915, AC005378, AF015157, |
| | | | | | AL109802, AL110505, AC005261, AP000113, AF015156, AF217403, |
| | | | | | AC005212, AP000556, AC004990, AC005664, AC007051, X74558, |
| | | | | | AF128525, AF107885, AC007308, AC004686, AC007243, L48038, |
| | | | | | AP000513, AF015147, AL133246, AL031577, AC005520, AL031257, |
| | | | | | AF015149, AB023049, AC006312, AL078476, Z83840, AC005231, |
| | | | | | AC016026, AL034549, AL031281, AC004491, AC007845, AC005538, |
| | | | | | U91326, AC006116, U57004, AC007421, AL033521, AC003041, |
| | | | | | AF070718, AF015151, U67235, AC009946, AC009516, AP000432, |
| | | | | | AC006600, AC004771, U07000, M87925, AC008012, AF205588, |
| | | | | | AL035681, AL021937, AC005544, AC002430, X78901, AC005015, |
| | | | | | Z49235, AB000878, AC015853, U11309, AC005844, AC000026, |
| | | | | | AC004894, AC007384, AP000469, AC007055, AC005944, Z84480, |
| | | | | | AC002082, AL117354, AC005105, Z97053, AF015150, AL035659, |
| | | | | | U91322, AL049795, M15205, AC002119, U67231, AC003982, |
| | | | | | AC007664, Z75744, U62317, U67230, AC005519, AC002059, AL035455, |
| | | | | | AC004613, AC003104, AL033523, AL109759, AC004895, AC002301, |
| | | | | | AP000552, AF015148, AC007324, AL022332, AC002054, AC007919, |
| | | | | | AC007546, AC006023, AC004841, AC009225, AC002559, AC002368, |
| | | | | | AC010206, AL031368, U67226, AP000567, AC006120, AC004972, |
| | | | | | U22376, AC005288, AC004600, AL031311, AL050097, AL031672, |
| | | | | | AC005081, AL049745, AC008498, U67229, AP000553, AL021939, |
| | | | | | AJ131818, AC005779, AL035071, U67213, Z49237, AC004028, U67234, |
| | | | | | AL031657, AL022721, AC002470, AC005011, AF015162, AC007371, |
| | | | | | AL035458, AL096829, AC004595, AL022315, AC007707, AC004531, |
| | | | | | AL050312, AC005500, AC005757, AC006207, AP000506, AD000092, |
| | | | | | AL078596, AC005600, L43392, AC007999, AC004815, Z68756, Z69666, |
| | | | | | AC002299, AL049636, Z93023, AC004859, AC006449, AL022324, |
| | | | | | AC005071, AC004913, AP000201, AC016025, and AJ010770. |
| HWLHT92 | 87 | 830322 | 1-446 | 15-460 | Z85996. |
| HWLIC75 | 88 | 830321 | 1-45 | 15-59 | |
| HWLIF03 | 89 | 830233 | 1-328 | 15-342 | |
| HWLIL65 | 90 | 747440 | 1-512 | 15-526 | AA521246, AA834532, AA664369, AI827922, AA766094, AI458257, |
| | | | | | AI915368, AI914009, AA740983, AI128279, AI128274, AI160827, |
| | | | | | AI222682, N30618, AI872758, AI569363, AW020599, AA524229, |
| | | | | | AA635389, AA847949, AL033527, AC003663, AL109847, AC004551, |
| | | | | | AC002394, AC007371, AL109963, Z97989, AC002067, AC007057, |
| | | | | | AL022238, AL024498, AC005412, AC007639, AF196969, AL049760, |
| | | | | | AC005952, AC002565, AL049776, AC005520, AC005844, AC005553, |
| | | | | | Z84487, AC002563, AJ011930, AP000493, AC002036, Z93930, U82757, |
| | | | | | AL050307, AF199339, AC004382, Y13537, Z85994, AC006241, |
| | | | | | AP000100, AC004805, AL031281, AL031591, AL031276, AF047825, |
| | | | | | AC006515, AC002554, AC007637, AL049569, AC005781, AC003104, |
| | | | | | AL031681, AC005722, AC004504, Z98742, AC006141, AL035417, |
| | | | | | AC005886, AC006512, AC004491, AC004216, AL022721, AL049692, |
| | | | | | AL031767, AC006057, AC005486, AC007051, AC005081, AC007766, |
| | | | | | AL109984, AC003098, AC006077, AL035411, AC005940, AC005736, |
| | | | | | AC007225, AC008967, AL049872, AC005225, AL049794, AP000103, |
| | | | | | AP000032, AL031283, AP000263, AC004033, AL031295, AC011422, |
| | | | | | AC006001, AL031120, AC007226, AC002470, AC002990, AL031311, |
| | | | | | AC004167, AC002350, AP000036, AC005088, Z98750, U47924, |
| | | | | | AC004655, AC002070, AC005529, U07562, AC006117, Z98044, |
| | | | | | AC005324, AC004851, AL021154, AL121603, AC002126, AC004016, |
| | | | | | AP000512, and Z97053. |
| HWLIM37 | 91 | 712654 | 1-190 | 15-204 | AW291552, AW138601, AI077575, AA780149, AI470521, AI079239, |
| | | | | | AI350461, AI190936, AA700035, AA700691, AA846411, AI075806, |
| | | | | | AA745860, AW104705, AI653668, AA620868, AA931634, AI358441, |
| | | | | | AI022949, AI147873, H78701, AA411234, AA599147, AA705723, |
| | | | | | AA912904, AI808843, AI400574, H41413, AA526292, AI682941, |
| | | | | | AA807011, AI027243, W47156, T73150, AA885483, AI300065, |
| | | | | | AI807760, AI457358, AI866405, AI986123, AF100749, and AR060022. |
| HWLIO73 | 92 | 761965 | 1-309 | 15-323 | |
| HWLIS62 | 93 | 722358 | 1-499 | 15-513 | AI335089, AW071975, AI922669, AI343825, AA875852, AI554367, |
| | | | | | AI290781, AI357884, AI088635, AA972857, AI129815, AI168499, |
| | | | | | R62969, AA813538, AA702864, H05057, AA436814, R39812, N78991, |
| | | | | | AA442570, W74268, AA133776, R56602, T48889, AA627735, |
| | | | | | AA142932, R80928, Z39624, R59136, R66723, AA993978, R67603, |
| | | | | | F02373, AA228698, R66262, AA368546, AA115592, AA486747, |
| | | | | | W17367, W79882, AL034397, and AJ132502. |
| HWLIW68 | 94 | 925892 | 1-472 | 15-486 | |
| HWLJB04 | 95 | 926066 | 1-446 | 15-460 | AA862391, and N62231. |
| HWLJC30 | 96 | 830232 | 1-726 | 15-740 | AI767585, AA516447, AW272896, AW299599, AA974871, AA524410, |
| | | | | | AI963626, AW204624, AI698859, and R67729. |
| HWLJE89 | 97 | 928258 | 1-572 | 15-586 | |
| HWLJG57 | 98 | 849123 | 1-518 | 15-532 | AW270505. |
| HWLJL14 | 99 | 832205 | 1-338 | 15-352 | |
| HWLJL46 | 100 | 830226 | 1-342 | 15-356 | AA506744, AA219542, AA776548, AA084679, AW248724, W47141, |
| | | | | | AW249151, AA679173, AA101377, AA668421, AA300049, AI445699, |
| | | | | | AA147521, AI702049, AI002952, AW265468, AW148821, N78600, |
| | | | | | AL138262, AW192930, AA757406, AL121039, AA621720, AW410844, |
| | | | | | AA180857, AI064968, AA172103, AA846014, AW020198, AW247338, |
| | | | | | AA077619, AA593480, AA182629, AI679759, AA516247, AA778962, |
| | | | | | AI133083, AI819391, AI283938, AW008184, N53448, AI267356, |
| | | | | | H94598, AA484651, AI241637, AW243808, AP000353, AL008720, |
| | | | | | Z92546, AC004150, AC004825, AL121655, AL035451, AL050307, |
| | | | | | AL133353, Z83308, AC005207, AC007514, Z82249, AL137548, |
| | | | | | AC004999, AC005031, U80017, AC020663, AC006023, AC006539, |
| | | | | | AL020997, AC005412, U71148, AL050341, AC006449, Z99755, |
| | | | | | AC002984, AL023575, AC003086, U62317, AL022313, AL078638, |
| | | | | | AC006241, AF207550, AC002430, AC002558, AL031295, AL022721, |
| | | | | | Z97055, AC002418, AC007384, AC004821, Z83820, AC006333, |
| | | | | | AF124730, AC004234, AC005484, AL021939, AC004386, AL022238, |
| | | | | | AC006130, AC005231, AL031282, AC002544, AL031668, AL109952, |
| | | | | | AL078581, AC005519, AC005696, Z98742, AL050129, AC006441, |
| | | | | | AC005694, AL031680, AL096801, Y18000, AF196779, AC004972, |
| | | | | | AC004019, AL049758, AP000300, AC003002, AP000045, AP000113, |
| | | | | | AL035417, Z98941, AC005043, AL031584, AC005874, AF134471, |
| | | | | | AC007731, AC004765, Z83847, AC005500, AL049776, Z93023, L47234, |
| | | | | | AL031728, AL135784, AC005377, AL096701, AC007684, Z95114, |
| | | | | | AC006581, AC003004, AD001527, AL031186, AC004505, AC005911, |
| | | | | | AC005399, AC009516, AC008009, AC005261, U95742, AC007565, |
| | | | | | AP000349, AP000230, AP000144, AC002425, AL109967, AC006254, |
| | | | | | AL022162, and AC007387. |
| HWLJN66 | 101 | 830229 | 1-541 | 15-555 | Z97053, AL031005, and AL022326. |
| HWLJP79 | 102 | 963698 | 1-836 | 15-850 | AL044649, AW149822, AW372403, AW022126, AI937028, AI832398, |
| | | | | | H52755, AI902686, AI523476, AI125713, D61865, AA913606, H23922, |
| | | | | | AI671047, AI523319, AW338626, AW338631, C05054, AW069280, |
| | | | | | AW025428, AI017617, AI554450, H65437, R83782, AW020014, |
| | | | | | AW384060, N20088, AI025375, AA358941, AW020227, AW372379, |
| | | | | | AW193889, AI921185, AI097582, C16388, C16369, AW021585, |
| | | | | | AI269495, AW118958, C16167, AI018455, AW384059, D54010, |
| | | | | | AI268738, AA380556, AI219878, H99109, AI278598, AI300002, |
| | | | | | AA503421, AI796695, AI421622, AW118123, AA708591, H88061, |
| | | | | | AI242119, H48158, AI925067, AA631826, AW080615, R71561, |
| | | | | | AI033678, AI423988, AI424104, AI222739, AA213469, H02742, N20549, |
| | | | | | AA744800, AA434408, D61931, AA179347, AA555272, D61016, |
| | | | | | AA564521, H04059, H45223, D81374, AI744022, AW151012, |
| | | | | | AA729594, AA987628, D60574, AI762567, H49945, H02770, H02165, |
| | | | | | AW242024, AA179154, AI690550, AW262043, AA551955, AA507614, |
| | | | | | D54275, AA214237, T35691, AA725244, D60843, C15668, AW362248, |
| | | | | | H02769, T30072, AA419350, AW376397, R80139, T05116, D60575, |
| | | | | | D60695, D60842, AL048702, H02164, AA527710, AW085223, |
| | | | | | AW021333, N29664, AA679787, R15695, AA744656, AA622316, |
| | | | | | AW407259, T18586, AI709204, D58121, T31072, H42460, H89037, |
| | | | | | C16578, C15955, D55586, AA482734, AW169465, H52797, H88062, |
| | | | | | AA715156, H88954, AA040056, AW006042, R10801, R63592, |
| | | | | | AW384124, R21798, AA330605, D52526, AW366348, AW078841, |
| | | | | | R71506, R10709, R34609, AA405202, AA151219, AI671907, AA040042, |
| | | | | | AA151218, AW269344, F13646, AI000596, AA861747, H03111, |
| | | | | | AI869576, AW362494, AA225398, T90939, AI302914, R34216, |
| | | | | | AA298995, AI355633, AA516073, AA089751, AA405203, R26368, |
| | | | | | R63540, AL079897, AI748860, AA910712, AA876685, AI648500, |
| | | | | | AA091600, AI902685, AW366389, AA383198, and T18524. |
| HWLJX38 | 103 | 925868 | 1-148 | 15-162 | |
| HWLJZ30 | 104 | 925870 | 1-596 | 15-610 | |
| HWLKC87 | 105 | 956205 | 1-517 | 15-531 | AF179880. |
| HWLKF70 | 106 | 830237 | 1-724 | 15-738 | AW183080, AI809545, AI693513, AW083841, AI762076, AW362479, |
| | | | | | AW291420, AW296936, AA657953, AA229394, H91857, AW105152, |
| | | | | | H91911, AA766735, AF003827, and AA877622. |
| HWLKL17 | 107 | 928720 | 1-422 | 15-436 | |
| HWLKR35 | 108 | 918557 | 1-597 | 15-611 | AL134524, AL045328, AL038838, AL037436, AL038983, AL047163, |
| | | | | | AI142134, AL079852, AL047012, AL044125, AL044162, AL040193, |
| | | | | | AL037295, AL037727, AL038532, AL040621, AL043538, AL043496, |
| | | | | | AL040464, AL041347, AL037323, AL041324, AL038822, AL041098, |
| | | | | | AL037435, AL040075, AL040463, AL041238, AL038761, AL037343, |
| | | | | | AL041163, AL044186, AL047170, AL040617, AL040149, AL043923, |
| | | | | | AL043814, AL037335, AL047219, AL044037, AL043845, AL040625, |
| | | | | | AL041635, AL041296, AL045684, AL040294, AL040576, AL041752, |
| | | | | | AL044064, AL040510, AL041459, AL047183, AL043467, AL041577, |
| | | | | | AL045753, AL042898, AL041086, AL041246, AL041096, AL043677, |
| | | | | | AL040839, AL043492, AL041602, AL040444, AL040052, AL046850, |
| | | | | | AL037443, AL040768, AL044074, AL041730, AL041523, AL043627, |
| | | | | | AL046994, AL041374, AL040472, AL041133, AL046914, AL043848, |
| | | | | | AL043570, AL046442, AL042135, AL040322, AL041233, AL041358, |
| | | | | | AL040119, AL039360, AL045671, AL039316, AL046392, AL041955, |
| | | | | | AL044272, AL041159, AL041168, AL047057, AL045817, AL044258, |
| | | | | | AL041346, AL045920, AL134110, AL040148, AL038745, AL041292, |
| | | | | | AL049018, AL040458, AL044187, AL041142, AL040332, AL045990, |
| | | | | | AL041197, AL044199, AL040529, AL040571, AL039643, AL046330, |
| | | | | | AL041277, AL079878, AL039338, AL040745, AL040370, AL040128, |
| | | | | | AL047036, AL044274, AL040553, AL040342, AL041186, AL040155, |
| | | | | | AL040414, AL040285, AL039744, AL040091, AL039432, AL044165, |
| | | | | | AL042096, AL041131, AL037341, AL043941, AL040090, AL045989, |
| | | | | | AL041051, AL040168, AL044201, AL046327, AI547295, AL043775, |
| | | | | | AL043444, AL045327, AL040253, AL041227, AL045857, AL040082, |
| | | | | | AL040329, AL037279, AL047037, AL041278, AL040238, AL040263, |
| | | | | | AL041140, AL044529, AL040255, AL045725, AL039915, AL043612, |
| | | | | | AI526176, AL041344, AL038651, AI547039, D29033, AL049069, |
| | | | | | AA585439, AL048677, T11028, AL041210, R29445, AL038878, |
| | | | | | AA585101, AL045211, Z28355, T23957, T23985, C16300, AL043537, |
| | | | | | AI318479, Z30131, AI547291, D61254, AI525556, AI541383, D57491, |
| | | | | | AI557084, AI526073, AI547250, AI546875, AI541374, AI541523, |
| | | | | | AI525431, AI546999, AA174170, AI541205, R29218, AI540967, |
| | | | | | AL079977, AI546945, AI541508, C16305, D55233, C14723, AI541365, |
| | | | | | AA585098, AI557731, AA585453, AI557262, AI541514, AI546971, |
| | | | | | U46344, T41289, D60844, AI546891, AA585476, AI525500, AI526194, |
| | | | | | AA283326, R28735, AI546828, AI557864, R28895, AI541346, R29177, |
| | | | | | AL038024, R28965, AI541017, AI547006, AI525306, AB033107, |
| | | | | | AR064707, AJ238010, AR066494, U94592, I05558, A93923, D50010, |
| | | | | | D17247, E13740, AJ244003, AJ244004, AJ244005, E03627, I48927, |
| | | | | | Y16359, AB025273, I84553, I84554, A60212, A60209, A60210, A60211, |
| | | | | | A98767, AR031566, A90655, A93963, A93964, AR062872, I63120, |
| | | | | | AR062871, AR017907, D13316, AR062873, A35536, A35537, AF082186, |
| | | | | | A25909, I06859, A18050, A23334, A75888, I70384, A02135, A04663, |
| | | | | | A02136, A04664, A60111, A23633, A02712, AR007512, AR038855, |
| | | | | | A81878, A77094, A77095, I00682, A95051, A18053, A93916, A20702, |
| | | | | | D78345, A64973, A43189, A43188, A20700, A11623, E00609, A11624, |
| | | | | | A98420, A98423, A98432, A98436, A98417, A98427, A11178, E01007, |
| | | | | | I13349, A10361, AR043601, A11245, Z32836, A93931, D13509, A22739, |
| | | | | | A85203, X81969, A16035, E17098, AL133053, AL122101, AR054723, |
| | | | | | AR023813, AL133074, AL133049, and A22734. |
| HWLKV34 | 109 | 957615 | 1-646 | 15-660 | |
| HWLKV91 | 110 | 830214 | 1-513 | 15-527 | N54321. |
| HWLKW04 | 111 | 969141 | 1-597 | 15-611 | AA046825, AA156232, W24222, AA046808, AI074059, AA804565, |
| | | | | | AA156054, AI079406, AI335087, AI831194, AA927505, AI038824, |
| | | | | | W20117, AI141175, AA147488, AI085738, AI081430, AI141435, |
| | | | | | AI086672, AI308846, AI088093, AW263203, AI391491, AA996038, |
| | | | | | AI146608, AI086624, AI085956, AI095699, AI147805, AI312528, |
| | | | | | AA888166, AA888822, AI075648, AI041513, AI074781, AI571404, |
| | | | | | AA927030, AA788786, AI309731, AA863122, AI025254, AA844067, |
| | | | | | AI073644, AI000826, AI079595, AA960909, W46844, AA576992, |
| | | | | | AA225982, AA676445, N23131, AA037037, N95533, AA974466, |
| | | | | | AI741287, W47172, AA975580, AI023076, AI028417, AA862562, |
| | | | | | N20551, AI203524, F20461, AA854218, AI1719742, AI031831, N29263, |
| | | | | | AI303024, AA137068, AA225981, AI880811, AA071499, AA137139, |
| | | | | | AA557947, AA470526, N49765, AI017241, AA071339, AI913857, |
| | | | | | AA082294, H40198, W46671, W61183, AA552473, AI085091, AI192144, |
| | | | | | H89983, W61182, AA485185, W68371, R78487, AA654079, AA157472, |
| | | | | | AA302416, AA082321, H81768, AI261461, N90436, AA746698, |
| | | | | | W37801, AA657730, D11865, AI371356, AI335366, AI345778, |
| | | | | | AA506060, AW305338, AI345129, AW268293, AI345740, AW303172, |
| | | | | | AI349836, AI349012, AI289672, AW086304, AI318134, AI310633, |
| | | | | | AI344902, AI345676, AW302638, AI310894, AW074966, AW301359, |
| | | | | | AI318161, AI318149, AI335466, AI343156, AI254293, AI345323, |
| | | | | | AW274108, AI583762, AI613395, AI345208, AI318603, AI318602, |
| | | | | | AW274347, AI613385, AI2244645, AI310790, AW302802, AI252728, |
| | | | | | AI583885, AI591254, AI336702, AI345422, AI307887, AI817421, |
| | | | | | AI306231, AI337623, AI343069, AI249590, AI609969, AI307869, |
| | | | | | AA366542, AI583839, AA665258, AI612159, AI053766, AI054241, |
| | | | | | AA651668, AW303152, AI054196, AI802815, AI247156, AI591287, |
| | | | | | AI249281, AI583652, AI318122, AI001112, AI344894, AI075640, |
| | | | | | AA844088, AI422646, AA382891, AA046974, AA046881, H98947, |
| | | | | | AI250125, AA292441, AA292490, AI222305, AI149884, AI341038, |
| | | | | | AA788814, AA767254, N28749, AI246984, AW272045, AI271500, |
| | | | | | F29921, AA724648, AI251040, AI053402, AA937982, AF070668, |
| | | | | | X59375, AL137550, Y10080, AL049382, Z82022, E02221, AL133067, |
| | | | | | AL122111, Z72491, AF132676, AF061836, I92592, AL133075, |
| | | | | | AL137480, AF113677, AL137271, AF113694, AF111851, X62580, |
| | | | | | AF030513, AF104032, AL137557, L31396, X65873, L31397, AF100931, |
| | | | | | AL122050, A77033, A77035, I48978, AF090896, AL110196, I33392, |
| | | | | | AL133072, AL133640, AF183393, U68233, A08916, AR038969, |
| | | | | | AF067728, I89947, A08913, X81464, I42402, AB007812, AL137488, |
| | | | | | A08910, I89931, A08909, I09499, U42766, AF061573, I49625, |
| | | | | | AL137459, AF159615, AJ238278, AL117435, U35846, X72889, |
| | | | | | AR038854, AL122049, I03321, AF113699, A03736, AB016226, E04233, |
| | | | | | AL050149, AF067790, AF162270, AF111849, AL122098, AF158248, |
| | | | | | AL110222, U96683, X93495, AL137533, AL110225, AL080124, |
| | | | | | AL080158, AL137705, AL117460, U68387, AF146568, AL133113, |
| | | | | | U91329, X98834, X53587, AF118094, A65341, AF118070, AL049314, |
| | | | | | AF079763, AF000301, AF090900, AJ012755, A08912, AL050366, |
| | | | | | AR020905, Y11254, A18777, AL137560, L30117, A08908, AF026124, |
| | | | | | AL137712, AF177401, E12747, AF113690, AL137478, AL133016, |
| | | | | | AF090901, AL049464, AL133557, AL080137, AL137476, S61953, |
| | | | | | I48979, X84990, AF113691, AL133014, AL133606, AL137463, |
| | | | | | AL133104, AL049300, AL080159, E02349, AL117583, AL137538, |
| | | | | | AL110221, S68736, AL050092, AL050138, A58524, AL133560, |
| | | | | | AL110280, A93016, AL137429, X82434, AL049938, AL050172, |
| | | | | | AL050146, AL117649, AL117394, AF139986, AL122121, AF119337, |
| | | | | | AF113019, AF090934, AL137283, A58523, AF126247, U58996, |
| | | | | | AF017152, AL050116, A12297, AF026816, Y10655, AC002467, |
| | | | | | AL137526, AF090943, AF118064, E05822, M30514, AF153205, A93350, |
| | | | | | AL096744, AL117440, AF061981, AL122093, AF091084, I26207, |
| | | | | | AL133080, AL133098, X87582, AL080127, E08631, AL133077, |
| | | | | | AL133568, AL137300, AL050393, AL133010, AL117432, AL050277, |
| | | | | | AF111112, I41145, A18788, AL080086, AF003737, AF113689, |
| | | | | | AL049466, AL133093, AL049283, AJ000937, AL133081, AL133665, |
| | | | | | X92070, AL137529, U00763, AF125949, AF113676, S78214, U80742, |
| | | | | | I00734, X63574, U72620, E07361, AL122110, AF100781, AF017437, |
| | | | | | I09360, AL049452, AR000496, U39656, AL117585, AL117457, Y14314, |
| | | | | | E00617, E00717, E00778, Y07905, AL080074, AF081195, AL122123, |
| | | | | | U49908, AL080060, AF210052, AF097996, AL133558, AF051325, |
| | | | | | A90832, Z37987, AL137294, AJ006417, AB019565, A21103, AF078844, |
| | | | | | S75997, E06743, AI250217, and AI334740. |
| HWLKW09 | 112 | 951716 | 1-571 | 15-585 | AP000500. |
| HWLKW17 | 113 | 860227 | 1-218 | 15-232 | AA503041, AW013974, AW021078, AI817999, AA856857, AI188696, |
| | | | | | AI499321, AI815007, AI375786, AI457260, AI472695, AI523679, |
| | | | | | AA916048, AA909513, AW169263, D53008, AI818022, AA629711, |
| | | | | | AI041426, AI334313, AI800128, T34424, Z17371, AW090077, |
| | | | | | AW088569, AI500715, AI149944, AW117620, T68169, AI872743, |
| | | | | | AI761089, AI671757, H12634, R79928, D57350, AI469660, N73071, |
| | | | | | T07670, AA648091, T63380, AA666212, AI819847, D57802, and |
| | | | | | D56837. |
| HWLLB11 | 114 | 954849 | 1-731 | 15-745 | AI745636, and AA102414. |
| HWLLH02 | 115 | 918427 | 1-322 | 15-336 | |
| HWLLH25 | 116 | 933479 | 1-122 | 15-136 | |
| HWLLS11 | 117 | 965899 | 1-731 | 15-745 | AA521136, AI002240, AL134536, AW392670, AL119355, AL119341, |
| | | | | | AL119457, U46346, AW372827, AW363220, AW384394, AL119443, |
| | | | | | AL134920, AL119319, AL119497, AL119335, AL134902, U46351, |
| | | | | | AL119324, U46350, Z99396, U46347, U46349, AL042433, AL119484, |
| | | | | | AL119363, AL119391, AL119444, U46341, AL119483, AL037205, |
| | | | | | U46345, AI142131, AL119439, AL119399, AL119401, AL119522, |
| | | | | | AL119396, AL119496, AL042984, AL134529, AL119418, AL042450, |
| | | | | | AL042614, AL134525, AL134538, AL042975, AL042965, AL042551, |
| | | | | | AL042544, AL043019, AL042970, AL042542, AL043029, AL043003, |
| | | | | | AL119464, AR054110, AR066494, A81671, AR060234, AB026436, and |
| | | | | | AR069079. |
| HWLLT02 | 118 | 918419 | 1-521 | 15-535 | AL031652. |
| HWLLV41 | 119 | 830150 | 1-405 | 15-419 | AI589207, AC002472, and AC002470. |
| HWLLX12 | 120 | 969681 | 1-399 | 15-413 | AC002379. |
| HWLPC29 | 121 | 965058 | 1-603 | 15-617 | AA525279, U51700, AI904835, and AL049713. |
| HWLPG05 | 122 | 930991 | 1-330 | 15-344 | D60875, D60267, and D60874. |
| HWMAD05 | 123 | 931076 | 1-396 | 15-410 | N86362, AA565006, F26713, AI434037, AA347382, AI064843, |
| | | | | | AA078184, AA745543, AI368732, AI133612, AA165505, AA515742. |
| | | | | | AW419389, AA630122, F24745, F23287, AA165346, AI686470, |
| | | | | | AI433104, AW243884, AA568314, AA595661, N44129, AA229422, |
| | | | | | AA214042, AI811647, AW105729, AA847102, AA460896, AA728880, |
| | | | | | AA303011, AC007462, AL132777, AC008009, AC006441, AF001550, |
| | | | | | AF217403, AL035072, AL022718, AC004884, AC006443, AC006323, |
| | | | | | AC006130, AC008044, AC006544, AC007773, AC004552, M17262, |
| | | | | | AC004983, AP000704, AC005874, AF134471, AC016830, AC003026, |
| | | | | | AL031295, AC004263, AL109952, AL031686, AL035459, AC005667, |
| | | | | | Z98743, AL022318, AL022394, AC004584, AF196779, AC003037, |
| | | | | | U02068, AC002350, U91326, AL135960, AJ131016, AC016027, |
| | | | | | AL109657, AC006084, AC002492, AP000547, AC007055, AL035249, |
| | | | | | AC002301, AC004820, AC008122, AC002550, AC007376, AC005203, |
| | | | | | AL034344, AC004517, AC004834, AF111170, AB026898, AL020989, |
| | | | | | AC007774, AC007688, AL109758, AL023805, AC003982, AC004610, |
| | | | | | AF111169, X55448, AL033376, AC004033, AC003663, AP000023, |
| | | | | | AC005520, AL133244, AC003684, AC004453, AF031078, AL031428, |
| | | | | | AC007371, AL078472, AC002404, AL023807, AF030876, AC006166, |
| | | | | | AB023051, AC007421, AP001053, AL022334, AC007367, AL031289, |
| | | | | | AC005049, AC007151, Z83838, AC002300, AL035400, AC004967, |
| | | | | | AC007312, AC004253, AC007999, AC005670, AB020874, AC004974, |
| | | | | | AL049709, AC012384, AP001052, U63721, AF107045, Z98036, |
| | | | | | AL020997, AL022726, AC006237, AC005305, AC004996, Z84488, |
| | | | | | AL021397, AC005015, AC009247, AC005159, AL024507, Z95116, |
| | | | | | Y14768, U91323, AL034379, AL031176, AC004531, AC000025, |
| | | | | | AC007686, Z93023, AC004707, AL009178, AL022476, Z29336, |
| | | | | | AJ003147, AC004382, AF064861, AC002430, AC002558, AC005519, |
| | | | | | AC010200, AC004493, AC005786, AC004217, AC005663, AC007731, |
| | | | | | AC005221, AL022393, AF118808, AL031280, AC005620, AL021407, |
| | | | | | AC005189, AP000220, AC004590, AC005392, AC005971, AC005839, |
| | | | | | AC004690, AC005972, Z84469, AL049856, AB026899, Z86064, |
| | | | | | AC005632, AC007384, AP000116, AL049795, AL024498, M31666, |
| | | | | | AC005036, AC004876, AL022313, L78746, AP000133, AP000211, |
| | | | | | AL121769, AL021707, AC002365, AC005902, and AC002045. |
| HWMEI07 | 124 | 830227 | 1-302 | 15-316 | AW148716, AI917055, N42321, AL038605, AI802542, AW302965, |
| | | | | | AI815855, AI340603, AA427700, AI308032, AI569583, AI312428, |
| | | | | | AA225339, AI269862, AI962858, AI571909, AL048656, AI521012, |
| | | | | | AL079963, AA640779, AW103371, AW403717, AL045266, AL039086, |
| | | | | | AI497733, AW023590, AI890833, AI926790, AI687127, AI590120, |
| | | | | | AI064830, AA572758, AA508692, AI564719, AI889376, AW268220, |
| | | | | | AL119863, AI349645, AI619502, AI677796, AL121365, AW026882, |
| | | | | | AI815232, AI344785, AI783504, AI536638, AI524671, AI554245, |
| | | | | | AL042382, AL045500, AI433157, AI343059, AI702073, AI340627, |
| | | | | | AI349933, AI468872, AA287231, AW238730, AL119457, AI921248, |
| | | | | | AL047042, AI886753, AW087445, AW150578, AI620284, AL036403, |
| | | | | | AW132056, AL044207, AL036274, AI282326, AI922901, AL036396, |
| | | | | | AI340582, AL036146, AI349937, AI537677, AW071417, AW301409, |
| | | | | | AI308035, AI500523, AI281773, AW168795, AI500706, AL040243, |
| | | | | | AL121014, AI284131, AW068845, AW102785, AW103893, AI561299, |
| | | | | | AI269696, AL037454, AI648663, AI800453, AI800433, AI868831, |
| | | | | | AI888953, AW020693, AL120853, AI334884, AI633419, AI348897, |
| | | | | | AI498579, AI445165, AI866002, AI433976, AI828731, AI251830, |
| | | | | | AL036802, AW169653, AI648684, AI687065, AI612759, AL041772, |
| | | | | | AI610645, AI869367, AW148320, AI784252, AI340519, AI608936, |
| | | | | | AW075413, AI500077, AI919345, AW088903, AL036361, AI439717, |
| | | | | | AL041150, AI274508, AI366549, AI636719, AI539153, AI309401, |
| | | | | | AW022682, AW268067, AI539771, AL038779, AI567351, AW074993, |
| | | | | | AI431424, AI349614, AI866608, AI343112, AL038565, AL036980, |
| | | | | | AA613907, AI539808, AI862144, AW268253, AI567612, AW301300, |
| | | | | | AI349598, AL036664, AI349256, AW075207, AI433384, AI312152, |
| | | | | | AL079741, AI345735, AW274192, AI345551, AA974049, AA493647, |
| | | | | | AW075084, AI281772, AI950664, F27438, AW193134, AW105601, |
| | | | | | AW074869, AW089572, AI307543, AI307210, AI307708, AI500659, |
| | | | | | AI312325, AW088134, AI753683, AW079368, AI313320, AI612885, |
| | | | | | AA804740, AI307520, AI284517, AI923989, AW302992, AI754897, |
| | | | | | AI491776, AI445237, AW151138, AI828583, AI312146, AI312339, |
| | | | | | AI433037, AI345258, AW302988, AI684279, AI310575, AW411310, |
| | | | | | AI254731, AI538829, AI886124, AI340533, AW149227, AI812107, |
| | | | | | AI345347, AI282655, AW161579, AW301505, AI923768, AL036869, |
| | | | | | AA420722, F37439, AI680498, AW051258, AW086113, AI439745, |
| | | | | | AW303152, AI538716, AL036631, AI499285, AI432969, AI873644, |
| | | | | | AW269097, AI476109, AI349004, AI566670, AI250663, AI953562, |
| | | | | | AI491852, AW059837, AL036736, AI274728, AI632408, AW071349, |
| | | | | | AW302973, AW268060, AI267502, AL048871, AI559296, AI336495, |
| | | | | | AL038445, AI696612, AW081242, AL036214, AI681985, AW081797, |
| | | | | | AI689248, AI954183, AI570781, AL036945, I48979, I48978, Y11587, |
| | | | | | AL137459, A08916, E07108, AF113694, I89947, A08913, U00763, |
| | | | | | AJ000937, X63574, AF017437, I89931, AL133080, AL050116, |
| | | | | | AF097996, AF090903, A08910, A93016, AF113677, AL133016, |
| | | | | | AL133565, I49625, Y11254, AL117460, Y16645, AL110196, AF079765, |
| | | | | | AF104032, AL137557, S78214, AL117457, AF090896, X82434, |
| | | | | | AL049430, AL110221, AL050149, S68736, AF106862, AL049382, |
| | | | | | AL050108, AL080137, AF091084, AL133640, AL049314, AF111851, |
| | | | | | AL133075, AF090901, AL133606, AF113019, AF090934, X84990, |
| | | | | | AF090900, AL050146, AF177401, AR011880, AF090943, AF113013, |
| | | | | | AL133557, AL080124, U42766, AF078844, A08909, AF113676, |
| | | | | | AB019565, AL122050, AF017152, AF125949, AL133560, AL137527, |
| | | | | | AL122123, AL049466, AF113690, AL049452, AF113689, AF118064, |
| | | | | | AF113699, X70685, AL110225, AL117394, AL050393, AF118094, |
| | | | | | AL117583, AJ242859, AL117585, AF158248, A58524, I03321, A58523, |
| | | | | | AF113691, AF125948, AF146568, AL122093, AL133113, AL080060, |
| | | | | | AL122110, AF118070, L31396, AL096744, L31397, U91329, AL122121, |
| | | | | | U72620, E03348, AL133093, AL137550, A65341, AL049464, E02349, |
| | | | | | AR059958, X96540, AL049938, AF067728, E07361, AF183393, |
| | | | | | AJ238278, AF111112, AL050277, AL050024, A77033, A77035, |
| | | | | | AL050138, I33392, AF087943, AL137271, Z82022, AL117435, A03736, |
| | | | | | AL049300, AL137648, A12297, AL137463, AL137521, X72889, U80742, |
| | | | | | X65873, U35846, AF061943, AL137283, AL122098, Y09972, AL122049, |
| | | | | | M30514, AL110197, AF026124, I09360, AF026816, I26207, S61953, |
| | | | | | AL137538, AJ006417, AL049283, E15569, AL133014, X98834, |
| | | | | | AF119337, U67958, AL080159, AL137560, I42402, A93350, AL080127, |
| | | | | | X93495, AL133072, AJ012755, I00734, E00617, E00717, E00778, |
| | | | | | A08912, AL110280, AR000496, U39656, AL133077, E08263, E08264, |
| | | | | | AL137526, AF057300, AF057299, AL133568, AF100931, AF132676, |
| | | | | | AF061836, AL133098, AF079763, A07647, A90832, AL133104, |
| | | | | | AF003737, AL137556, Y14314, AL080074, Y07905, U68387, AL050172, |
| | | | | | X92070, AR038969, AR013797, E05822, Z72491, AF153205, I66342, |
| | | | | | AF185576, X87582, AF051325, AF081197, U78525, U58996, AR038854, |
| | | | | | X83508, E04233, AL137478, AL137523, I17767, AF111849, AF162270, |
| | | | | | AL133067, U96683, A45787, AL117440, AL137476, Z37987, AF008439, |
| | | | | | AL117649, AL137480, AL122118, E02221, AL137533, AL050092, |
| | | | | | U49908, AL137429, AF118090, L30117, E08631, AL117432, AF081195, |
| | | | | | AF061573, AL137294, AL080086, AF126247, AF106827, AF061795, |
| | | | | | AF151685, Y10655, X62580, AF000145, I09499, and AL137292. |
| HWMEL48 | 125 | 830256 | 1-252 | 15-266 | AC004777. |
| HWMEU56 | 126 | 922375 | 1-487 | 15-501 | |
| HWMFA28 | 127 | 965354 | 1-437 | 15-451 | |
| HWMFG10 | 128 | 963406 | 1-578 | 15-592 | |
| HWMFG32 | 129 | 883180 | 1-360 | 15-374 | AA491767, H58891, AA515723, N69399, T40210, H73306, AA366601, |
| | | | | | AI590592, AI479148, AA486573, AW302923, AA846482, F34605, |
| | | | | | AI133083, AW089016, AI355873, AI620415, AL122020, AC004876, |
| | | | | | AC005585, AC005089, AL031311, Z93023, AL035697, AC007363, |
| | | | | | AC006020, AC002456, AL049830, AP000355, AC002312, AC004491, |
| | | | | | AC000379, AC007543, Z98742, AC005215, AC007637, AC007546, |
| | | | | | AF017104, AC002565, Z82205, AL034421, U80017, AL121652, |
| | | | | | AC006515, AB023051, AL031680, AC005081, AC004263, AC022517, |
| | | | | | AL034548, AL022476, AC006317, AL080243, AC005015, AC005225, |
| | | | | | AC004685, AC004217, AC007406, AC005696, Z98885, AC006312, |
| | | | | | AC002549, AC006578, AL031280, AC004019, AC003101, Z84469, |
| | | | | | AP000065, AL031295, Z98941, AL035658, AF134726, AL117352, |
| | | | | | AL035699, AC002369, AC007308, AC004381, AD000812, AC006211, |
| | | | | | AL020997, AF196971, AC005932, AC005529, AC004973, AL031577, |
| | | | | | AC005722, AL034409, AC004583, AF024534, AC004966, AC004216, |
| | | | | | AP000512, AL133243, AC004686, AC002430, AP000692, AC002365, |
| | | | | | AC004841, AC004638, AF196779, AC003108, AC007731, AC004887, |
| | | | | | AL022316, AC006101, AC005971, U62293, Z96074, AL049843, |
| | | | | | AC006238, AL031846, AL050341, AC007384, AL049569, AC005231, |
| | | | | | AJ003147, AC005846, AL139054, U96629, AL022721, AC005332, |
| | | | | | Z82211, AC004910, AC000052, AC005387, AL050318, AC005086, |
| | | | | | Z85987, AC002477, AC004707, AC002375, AC008044, AF053356, |
| | | | | | AC004797, AC006077, AC004584, AP000466, AC000067, Z82179, |
| | | | | | AC008268, AC004859, AC005632, AC005919, U91318, AF123462, |
| | | | | | AC006430, AF111169, AL049760, AC005057, AC007226, Z86090, |
| | | | | | AC006459, AF139813, AD000813, AP000509, AF111168, AC004905, |
| | | | | | Z69917, AC002558, Z84476, AC007193, AF001549, AP000248, |
| | | | | | AL022326, AP000350, AC002126, AC006449, AC004821, AL096703, |
| | | | | | Z95114, AL049856, AC002316, AL109798, AC004167, AC002310, |
| | | | | | AC009721, AC005082, AC005752, and AL034429. |
| HWMFH23 | 130 | 849129 | 1-332 | 15-346 | |
| HWMFQ90 | 131 | 928646 | 1-347 | 15-361 | |
| HWMFY21 | 132 | 974325 | 1-570 | 15-584 | |
| HWMGL13 | 133 | 947969 | 1-411 | 15-425 | U37501. |
| HWMHG06 | 134 | 933534 | 1-615 | 15-629 | |
| HWMHG26 | 135 | 957665 | 1-512 | 15-526 | AA707467, AW292400, and AL122104. |
| HWMHS10 | 136 | 961647 | 1-742 | 15-756 | |
| HWMHT22 | 137 | 917570 | 1-667 | 15-681 | AL117342. |
| HWMHX12 | 138 | 914007 | 1-724 | 15-738 | AF048727. |
| HWMHZ25 | 139 | 951699 | 1-341 | 15-355 | |
| HWMID39 | 140 | 915686 | 1-490 | 15-504 | |
| HWMIR03 | 141 | 922302 | 1-322 | 15-336 | |
| HWMJB68 | 142 | 914031 | 1-386 | 15-400 | AI431513, H53217, H60249, R95840, N72170, AA470567, H66577, |
| | | | | | AW167773, AL048275, AA975894, N22465, T50061, H78898, |
| | | | | | AA503298, AI371208, AA299589, AI565126, AI610737, AA405726, |
| | | | | | AA492105, AW068580, AA303131, F00564, AW089916, AA713705, |
| | | | | | AA368155, AI678992, F35663, AW021674, AI745335, AA015948, |
| | | | | | AC002302, AC005520, AL031228, AC005409, AP000692, Z86090, |
| | | | | | AC006449, AC004253, AL035071, AL033521, AC004526, AC004967, |
| | | | | | AC002425, AL109952, AC004796, AL035405, Z85987, AC005620, |
| | | | | | U91326, AC002544, Z83308, AC003101, AC007687, AC010582, |
| | | | | | AC004148, AF049895, AC006316, AC005284, AC004890, AC007226, |
| | | | | | AF196972, AC005484, AC004000, AC007216, AL133448, Z83844, |
| | | | | | AC006511, AL049760, AC007637, AC003695, AC000025, AL096701, |
| | | | | | AC000385, AC005527, AF053356, AC004757, U63721, AF196779, |
| | | | | | AL022322, Z97876, AP000252, AL049839, AC005962, AL109984, |
| | | | | | AC002115, AL035420, AP000212, AP000134, AC007376, AF038458, |
| | | | | | AC004150, AC005846, U95742, AC005015, AL021397, U47924, |
| | | | | | AF134726, AC007387, AC006071, AC004491, AC005971, AL049776, |
| | | | | | AC004686, Z83826, AC007308, Z83843, AC005529, AL096791, |
| | | | | | AF165926, AC002470, AC005200, AC005519, AC006211, AC006057, |
| | | | | | AC004805, AC005488, AC007225, AC005697, AC006581, AL008582, |
| | | | | | AF045555, AC005777, AC005081, AF047825, AC005383, AC002045, |
| | | | | | AC005399, AC005031, Z98036, AC004975, AL080243, AL035587, |
| | | | | | AC009464, AC002476, AC004644, AL121603, AC006512, U80017, |
| | | | | | AP000512, AC005829, AC005370, AC006088, AC004832, AL022476, |
| | | | | | AL121653, AP000501, AL035458, AL020993, AP000248, AC005089, |
| | | | | | AF001549, D88268, AC004887, Z98200, AF111168, AL023553, |
| | | | | | AC005500, AC007395, AL049830, AC005180, AC006111, AL133289, |
| | | | | | AC002404, L78810, AL080317, Z99716, Z93930, AC005189, AC000353, |
| | | | | | AF196969, AC005778, AC005288, AL049779, AC005295, U85195, |
| | | | | | AC007363, AC005480, AL117338, AC006273, AC005280, AC003963, |
| | | | | | AL031767, AC005011, AL121825, AE000658, AP000210, AP000132, |
| | | | | | AP000513, AC006441, AJ003147, AC000004, AP000211, AP000133, |
| | | | | | AC006241, AF207550, AC005231, AC005972, AC006077, AC004815, |
| | | | | | AP000032, AP000704, AC000066, AC006251, AL034555, AC005696, |
| | | | | | AL031588, D86992, AL034417, AC003007, AL031597, Z85986, |
| | | | | | AC007686, U52112, AL035461, AJ010770, D88270, and AC006312. |
| HWMJE50 | 143 | 933501 | 1-104 | 15-118 | |
| HWMKI01 | 144 | 913841 | 1-658 | 15-672 | H43471, AI859744, AA635433, AI299882, AA071151, AW272815, |
| | | | | | AI679871, AI251024, AI309979, AA282951, AI479148, AI929796, |
| | | | | | AA610255, AI962030, AA743996, AA984829, AI932871, AL037714, |
| | | | | | AA602017, M78032, AA515728, AI636734, AI623364, AA397821, |
| | | | | | AL134216, AA722505, H43183, F18761, AA368155, M78026, |
| | | | | | AW341955, AA115865, AA557945, AA488687, H87936, AA469327, |
| | | | | | N68677, AI678476, AA643770, AI282629, AA846923, AL037856, |
| | | | | | AL042373, T07225, AA533408, AW408596, AW238495, AI348780, |
| | | | | | H77492, AI358514, AC004491, AL109865, U91327, AC004967, |
| | | | | | AC004000, AL022322, AC006509, AC005777, AL031282, AC007666, |
| | | | | | AC005516, AC000052, AL035089, AL031666, AF134726, AC006001, |
| | | | | | AL023879, Z95116, AC005082, AC005736, AL034420, AB023050, |
| | | | | | AC007030, AP000347, AL049872, AC000353, AC004033, AC005067, |
| | | | | | AC005602, AL035405, AL049776, AF196779, AL022318, AC004796, |
| | | | | | AP000346, Z98036, AC005500, AL035086, AP000694, AC004883, |
| | | | | | AC005274, AL049780, AP000313, AC002316, AC002425, AC015853, |
| | | | | | AP000547, AL031291, AF111167, AP000050, AL031681, AC005578, |
| | | | | | AB001523, AC005529, AP000117, AL031284, AC004019, AL021453, |
| | | | | | AC005225, AC002126, AF064861, AL133035, AP000690, AL109984, |
| | | | | | AC004983, AC020663, AL031848, AC006077, AL031670, AC007308, |
| | | | | | AC005899, AP000008, AF053356, AC006023, AC002090, AC005220, |
| | | | | | AC005015, AC016025, AP000704, AC005488, AL049569, AC004242, |
| | | | | | AC005231, AL035420, AC003663, AC004752, AL035659, AC004832, |
| | | | | | AC007052, AC005412, AF111168, AL136295, AL031311, AC005670, |
| | | | | | AC007199, AL117339, AL117354, AL034429, AC005914, AL049694, |
| | | | | | AL117694, AC004477, AC002470, AL031846, AC005520, AC002350, |
| | | | | | AC003043, AF155238, AC005839, AL080243, AC006322, AL035410, |
| | | | | | AF003626, AC005081, Z98743, Z93020, AC005829, AC009247, |
| | | | | | AC004583, Z84480, AC007055, Z83826, AL109799, AP000104, |
| | | | | | AC005480, AC003030, AC006241, U80017, AC008372, AC006285, |
| | | | | | AL008583, AL096701, AC004257, AL049636, Z73359, AC003690, |
| | | | | | AF018080, AC005180, AP000692, AC007736, AC005911, AL031283, |
| | | | | | AC007688, AC005778, AC007358, AC005512, AL135783, AL023553, |
| | | | | | Z93241, AL133355, U95741, Z99716, AL022336, AC006088, AL122020, |
| | | | | | AC004884, Z98745, Z93023, AC004263, AC002504, AC005940, |
| | | | | | AC000073, AP000009, U82668, AC005932, AC005288, AC006538, |
| | | | | | AC007216, AL049539, AC004699, AP000688, AL049874, AC002546, |
| | | | | | AC004962, AC007955, AC005620 AC005005, AL049765, AC005678, |
| | | | | | AL035419, AC002301, AC004106, AL121603, AL021546, AC008126, |
| | | | | | AC016831, AC005730, AC004526, AC007227, AD001527, AC007546, |
| | | | | | AC004408, AC004706, AL031683, AL035658, AC006111, AF124523, |
| | | | | | AC002364, AL035587, AB020868, AC003029, AC007057, AL031680, |
| | | | | | U07562, AF045555, AC006450, AL133163, Z99128, AC008044, |
| | | | | | AF118808, AF196969, U52112, AC004882, AL049839, AC004150, |
| | | | | | AC005837, AC002300, AP000090, AL022238, AC007731, AC004765, |
| | | | | | Z74739, AC005971, AC006120, AL031577, AC005233, AC005821, |
| | | | | | AP000350, AL031733, AL034417, AC002558, AP000555, U91318, |
| | | | | | AC004841, AC005360, AC005332, AL049843, AC005037, AP000228, |
| | | | | | Z98044, AF091512, AP000510, AC004593, AC006257, AC004859, and |
| | | | | | AF111163. |
| HWMKI10 | 145 | 961616 | 1-513 | 15-527 | AA365382, AF155219, AF149877, and AF126427. |
| HWMLG23 | 146 | 961110 | 1-233 | 15-247 | AA353040, AA383720, AA382189, AA133917, AI751877, AA315963, |
| | | | | | AA057016, R13065, AF151802, and AF042284. |
| HWMMA12 | 147 | 969173 | 1-240 | 15-254 | AW138984. |
| HWMMG65 | 148 | 928823 | 1-768 | 15-782 | AW139091, AI434608, AA653723, AI658553, AI418050, and AI675691. |
| HWMMS65 | 149 | 917513 | 1-603 | 15-617 | |
| HWMMY66 | 150 | 966367 | 1-394 | 15-408 | N22506, AA358178, AL117339, AF205588, AL022345, AC005815, |
| | | | | | AC004126, and AC007766. |
| HWMNC07 | 151 | 951724 | 1-37 | 15-51 | |
| HWMGO10 | 152 | 961716 | 1-303 | 15-317 | AW085802, W15495, AI510780, AW070676, AA678924, AI096738, |
| | | | | | AI699147, AA722955, AA228292, AP000692, and AB023150. |
| HWMAE12 | 153 | 969692 | 1-728 | 15-742 | AA492421, H51230, AR028772, AC004601, and AC005684. |
| HWLPN12 | 154 | 969572 | 1-445 | 15-459 | AI004958, AA481489, AA481174, F00376, T17269, AA503168, |
| | | | | | AA664604, AL037910, AI292236, AL046782, AI633168, AW338508, |
| | | | | | AW082744, AI582890, AA342562, AI357823, AA878149, AI952900, |
| | | | | | H62778, AA653612, AA665645, AA654321, AI049996, R92640, |
| | | | | | AI826845, AA577732, W45355, AA323085, AA603323, AI538540, |
| | | | | | AW021917, AA558298, R82388, W44373, AA297538, AA758266, |
| | | | | | AW117740, AA086318, AA582554, AI748803, AW148792, AI124798, |
| | | | | | AI678392, AA878140, AI830390, W01998, AA878431, AA037110, |
| | | | | | W01999, AW068316, R79597, AI536625, AA593471, AW082117, |
| | | | | | AL119555, F23255, H84359, AA634837, AI569982, AI709096, |
| | | | | | AA720732, AA477103, AI049598, H82330, AA879053, AI753113, |
| | | | | | Z85986, AC012599, Z99127, AP000502, Z96050, AL117352, AC002040, |
| | | | | | AC006318, AL031277, U62631, AC007347, AC002347, AL031120, |
| | | | | | AC002544, AL035460, AF134726, AC006254, AC007030, AC004765, |
| | | | | | AL109798, AC003043, AF117829, AC004222, AP000514, AC004448, |
| | | | | | AC003029, AC007637, AL031283, AC004859, AF003626, AC006262, |
| | | | | | AC004003, AC005300, AB020868, AC007736, AL022313, AJ246003, |
| | | | | | AL031650, AL008708, AC007666, AC006257, AC006013, AC005592, |
| | | | | | AL031282, AL031276, AC004256, AC004090, AC004983, Z82201, |
| | | | | | AC006538, AC004595, AC005529, AC005179, AC002073, AL049745, |
| | | | | | AC006312, AF037338, AC005288, AL132777, AC006026, AC007055, |
| | | | | | AC005839, AF121781, AC005377, AC003663, Z95331, AC004841, |
| | | | | | AC008012, AC005899, AC005921, AC006137, AL021395, AC004990, |
| | | | | | L29766, AC009514, AL023283, AC004150, AC000026, AC006132, |
| | | | | | AL021155, AL023879, AP000115, AL034417, AC002115, AF037222, |
| | | | | | AC002059, AC005531, Z84480, AL035415, AC005102, AL050306, |
| | | | | | AC006017, AC004655, AC005157, AL121769, U95742, U78027, |
| | | | | | AC004087, AC005358, L32588, AC004890, AL133448, AC006480, |
| | | | | | AC007216, AL031659, AL024509, AC007566, AC007671, AC005005, |
| | | | | | AL049795, AL049591, U82757, AC008498, AL035422, AB015355, |
| | | | | | AL031289, AL136295, U63721, AC005696, U91326, AC005520, |
| | | | | | AC005823, Z82244, AC003049, AC005745, U50537, AC006960, |
| | | | | | AL022068, AC006390, AC005209, AL133353, AC005494, AC004813, |
| | | | | | AC006948, AC002057, AL121767, AC008009, AL121748, AL034345, |
| | | | | | AC005488, AL121934, AL132992, AC006360, AC004949, AF196969, |
| | | | | | AC004024, AC007225, AL031846, AC005015, Z99716, AC007639, |
| | | | | | AF031078, AL022327, AC007919, AC004878, AC005763, AC005701, |
| | | | | | AC007899, AD000671, AL023575, AF030876, AF111168, AC006449, |
| | | | | | AC005291, AL022336, AC005736, AC005527, AC005004, AL008726, |
| | | | | | AC007537, AC004771, AC005827, AL049776, AC002366, AP000505, |
| | | | | | Z97876, AC002425, AL031055, AL049692, AL031005, AP000961, |
| | | | | | AL121603, AL109627, AC005971, AP000066, AL031670, AC004496, |
| | | | | | AC005037, AC011718, Z97054, AL034582, AP000553, AC004849, |
| | | | | | AC009516, AC007262, AC007226, AL121694, AC008372, AC005203, |
| | | | | | Z84483, AC004125, AC005740, AC005632, AC003083, AF111167, |
| | | | | | AL009031, AC002326, AC006116, AC003012, Z98749, AP000552, |
| | | | | | AC012398, AF061032, Z98051, AC008079, U91324, AC004955, U89337, |
| | | | | | AL022162, AP000689, AC006487, AL022316, AP000280, D83253, |
| | | | | | AL049869, AL031178, AC004812, AC004796, AC004874, AP000518, |
| | | | | | Z83840, AC005393, AL139054, AC005820, AL031682, AC005914, |
| | | | | | AL049696, AC004814, AP000039, AP000107, AL109657, AC009501, |
| | | | | | Z99289, AC005703, AC006277, and F01304. |
| HWLLZ91 | 155 | 887157 | 1-451 | 15-465 | AL022322. |
| HWLLD02 | 156 | 930932 | 1-418 | 15-432 | AI452848, AW296319, AA928929, AI333232, N67650, AA558581, |
| | | | | | R37383, AI689843, AI002814, Z39760, R66421, AA634494, F09812, |
| | | | | | R43751, W37287, AL047118, T72545, H39739, F02269, AA214212, |
| | | | | | H21614, AI298767, AW294091, AW008823, AA127563, and AI421390. |
| HWLKT19 | 157 | 974292 | 1-494 | 15-508 | AL119483, AA084401, AA714605, R48980, AA527963, AA149475, |
| | | | | | AA654482, AI475870, AW162750, AI362694, AA663074, AI928890, |
| | | | | | AL134920, AA309318, N23095, AW327422, AA020882, AC004167, |
| | | | | | AC006971, AC006543, AC006544, D86995, AF111168, Z92846, |
| | | | | | AC006251, AL080317, U66061, AL035658, AL021917, AL117351, |
| | | | | | AC008115, AC004890, AC006312, AC007387, AC007371, AC005736, |
| | | | | | AL049779, AC003103, AP000692, AC004884, AC007199, AP000141, |
| | | | | | AC004858, AP000088, AP000696, AC004770, X87344, D87675, |
| | | | | | AC000134, AL031659, AF030453, AC005088, AL031278, AC006530, |
| | | | | | L44140, AL031774, AC002492, Z82190, AC004031, AC004079, |
| | | | | | AL031293, AL035458, AC005630, AC002400, AL035405, AC010206, |
| | | | | | AC008119, AP000555, AB000876, AC004181, AC004841, AB000882, |
| | | | | | AP000346, AP000501, Z69721, AC006146, AF109907, AF161221, |
| | | | | | AP000300, AP000045, AP000113, AF020662, AC005233, AL031257, |
| | | | | | AC005914, Z94277, AP000697, U95626, AC002994, Z82198, AC012085, |
| | | | | | AL080243, AC004887, AC004805, AC005740, AL008718, AF001550, |
| | | | | | AC000035, AC003695, AL031577, Z97053, AC002395, X89814, |
| | | | | | AL049856, AP000295, AC005480, AP000111, AP000043, AP000128, |
| | | | | | AP000206, AC004929, AC004150, Z84466, AC004477, AP000245, |
| | | | | | AC007011, AL035086, AL133448, AC007773, AC005529, AC006285, |
| | | | | | AL079342, AJ251973, AC002375, AC004242, Z98742, AC004883, |
| | | | | | AL121603, AL009181, and AC005921. |
| HWLKQ11 | 158 | 965390 | 1-163 | 15-177 | AA825330, AA100338, AA313691, AA127036, H19273, AA025872, |
| | | | | | AA081777, AA360187, AI272649, AW388050, F34605, AW071109, |
| | | | | | H48768, AA358288, H68343, AA516214, H40478, AA643784, |
| | | | | | AA515728, AI811685, C75139, AI096714, AA772873, F24284, |
| | | | | | AA745302, AW245354, R96427, AW337805, R98218, AL079894, |
| | | | | | AW373645, AA602458, N34258, AA664924, AA565911, AI890971, |
| | | | | | H81406, AA653955, AI799569, AA808847, AI446259, AL048479, |
| | | | | | AW084431, AA315052, AI049709, AA447006, AA838192, AA323644, |
| | | | | | AI633386, AI192440, T86603, AA516328, T60316, AA653713, |
| | | | | | AI821382, AI820534, AL047480, AI921765, AA368659, AA525407, |
| | | | | | R67086, AI564215, AI003391, T85570, AW023515, W02749, AA349746, |
| | | | | | AA654482, AW408756, AA361513, AA365056, AA714899, AA808843, |
| | | | | | AA618316, T05617, AI207476, AA632993, AW162750, AW022891, |
| | | | | | AW074210, AA297698, AI299192, AW245860, AL134527, AA828834, |
| | | | | | R48980, AA577727, D87453, AF196971, AC006962, AC004757, U02052, |
| | | | | | Z93244, AF207550, AC007191, Z82201, Z98050, AL050323, AC004706, |
| | | | | | AC006992, AP000432, Z29336, AP000253, AP000213, AP000135, |
| | | | | | AP000031, AC005782, AL021977, AL034420, AC008041, AL049536, |
| | | | | | AC006313, AC005189, AL133355, AL031186, AC008154, AL022311, |
| | | | | | AC003111, AC005006, AF031076, AL096712, AC007193, AC006480, |
| | | | | | AF001550, Z86090, AF024534, AC007421, AL034402, AC005086, |
| | | | | | AR036572, U91328, AL049570, AC002310, AC007868, AL035408, |
| | | | | | AC007993, AL034429, AL121658, AC004634, AL135959, AP000167, |
| | | | | | AP000052, Z82195, AL133304, AC004844, AF031078, AP000008, |
| | | | | | AC005520, AC005197, AC006449, Z82190, AL049198, AC004081, |
| | | | | | AF030876, AL117694, AC004552, AC005480, AC005274, U72790, |
| | | | | | AP000704, AC000035, AC006030, AP000207, AP000129, AC000025, |
| | | | | | AC005527, AP000245, U52112, AC006530, AC005529, AL049832, |
| | | | | | AP000510, Z46940, Y09781, U15422, AL035462, AP000289, AP000042, |
| | | | | | AP000110, AC005865, AL022326, AC004057, Z82184, AF146367, |
| | | | | | AF124523, AF118808, AC005342, AC005066, AL023284, AF205588, |
| | | | | | AP000090, AC005793, Z84474, AC006205, AL021528, U95742, |
| | | | | | AC007488, AC006120, AC007216, AC008275, AP001049, AF024533, |
| | | | | | Z98044, AL034554, AB023048, AC008062, AC002094, AL031659, |
| | | | | | Z75889, AL031670, AC004966, AC002347, AJ006995, AC007395, |
| | | | | | AL022328, AC005777, AC004687, AC002351, AC004382, Z84721, |
| | | | | | AL049653, AL035652, AP000089, AP000141, AB017602, AL121653, |
| | | | | | AC008273, AL024508, AC005535, AC005220, D87675, AC006479, |
| | | | | | AC004386, Z97056, AB020863, AC005239, AP000269, AP000103, |
| | | | | | AF196972, AC004655, AF106564, AC007182, Z83826, AL031589, |
| | | | | | Z83851, Z82243, AC005067, AC004223, AL020993, AC004668, |
| | | | | | AC002112, Z97206, AL034548, AC007011, AC007263, AC002365, |
| | | | | | AL049611, AC007014, AL096774, AL049729, X54156, U94788, |
| | | | | | AP000320, AC005902, AC004178, AC002984, AP000120, AL031286, |
| | | | | | AC005193, AC007161, AL035542, AL031729, AL031588, AC004583, |
| | | | | | AC009396, U91324, AC004491, AL031387, AC007773, AC004025, |
| | | | | | AL135960, AJ131016, AF111167, AC007308, AC002470, AC004771, |
| | | | | | AC005756, AC004707, AC005808, AF111169, L12582, AC005722, |
| | | | | | M64093, M29929, Z95115, Z49154, AC004030, AC005952, Z83733, |
| | | | | | AC004131, Z98743, and AL049749. |
| HWLKJ18 | 159 | 930414 | 1-798 | 15-812 | AI270326, AA747375, AI446205, AW407919, AI927094, AW189068, |
| | | | | | AI683294, H54340, AA324186, AA593471, AI160117, AA469327, |
| | | | | | AA744272, R70333, AA744001, AA779783, AA745524, AI303008, |
| | | | | | AW270768, AA551798, AA744455, H21488, AA342256, AI245423, |
| | | | | | F04697, AA745588, AI672135, AA371567, F37169, AA085587, |
| | | | | | AA743966, AA603264, AI367523, AA586433, AA502568, AA716755, |
| | | | | | AA635433, AI264743, AA664604, AA846923, AA484228, AA342189, |
| | | | | | AW265393, AI284108, AI081147, AW008074, H58472, AI590404, |
| | | | | | AI568683, AW088130, AA669522, AA599080, AW104163, T40848, |
| | | | | | AA206629, AI148245, H91706, AW238016, AA828860, AI291037, |
| | | | | | AL043721, AW078909, AA284062, AA604395, AA350596, AA937686, |
| | | | | | AI701959, AA654482, AA228824, AI932871, AA358086, AI360514, |
| | | | | | AI583142, AI418529, AW277174, AA604843, AI798041, AI689019, |
| | | | | | AA557486, AW102955, AI917982, AW265009, AW440549, AW440492, |
| | | | | | T47739, AI978712, AA781504, AI367721, AA657741, W23546, |
| | | | | | AA384039, AA262752, AW406659, AI870453, AW069450, F03525, |
| | | | | | AI168205, AW085626, AW088559, AA568947, N45056, AI352078, |
| | | | | | AI570943, AL049872, AP000344, AL009181, AC006354, AC005667, |
| | | | | | Z82900, AC004929, AB011134, AC006014, AC008064, AL035400, |
| | | | | | AP000345, AL110122, U73638, AC005914, AC004211, AC006121, |
| | | | | | AL135745, AL023799, Z86090, AC005531, AC005206, AC005327, |
| | | | | | AC006441, AC006952, AC005264, AC006017, M87914, AC002425, |
| | | | | | AP000502, AC002422, AB023049, AC005911, AL121655, AL049829, |
| | | | | | AP000512, L78810, AC004973, AC003035, AC006312, AP000694, |
| | | | | | AC002126, AB023050, AL080243, AP000133, AP000211, AC004820, |
| | | | | | AC003078, AL078463, AC004815, U07562, AF019413, AC003973, |
| | | | | | AC005105, AL020997, AC005480, AC005828, AC009509, AL022726, |
| | | | | | AL034430, AC004470, AC008041, AC004963, AC006538, AC006953, |
| | | | | | U07563, AC003684, AP000511, AC004837, AC005768, AC005180, |
| | | | | | AL078639, AC002347, AC003664, AC004797, AL031257, AC003101, |
| | | | | | AL050318, M90058, AC006511, AL031774, D00591, U69730, |
| | | | | | AC005988, AC007686, AC006388, AC004383, AC005049, AC004595, |
| | | | | | U73636, AC011421, AC005785, AC004854, AC003104, AC005071, |
| | | | | | Z98051, AL031848, AC002055, AL049611, AC005280, AC006048, |
| | | | | | AC005619, D26067, AC005146, AC005971, AL117337, AC006468, |
| | | | | | AP000500, AC006111, AC005902, AC006327, AL096701, AL034370, |
| | | | | | AL096827, AP000557, AL035427, AC005877, AC005089, AC006021, |
| | | | | | AC004996, AC007731, AC005500, AL135744, AC004151, AL079334, |
| | | | | | AC000094, AC005903, AF112482, AC000085, AC003957, AC005245, |
| | | | | | U02068, D88268, AF205588, AP000509, AL133163, AL132987, |
| | | | | | AC007842, AC005081, U91321, Z81313, AC002045, U63630, AL021155, |
| | | | | | AL031053, AC005370, AC002301, AC006581, AC004975, AC004745, |
| | | | | | AL096791, AC004972, Z99716, AC004805, AL031393, AC007066, |
| | | | | | AC005192, Z98941, AL022315, AC004881, AL078621, U82828, |
| | | | | | AC006208, Z82214, AF064864, AF165176, AL035450, AC010168, |
| | | | | | AC006449, D84394, AC002511, AC001234, AL117328, AC006285, |
| | | | | | AC005232, AC005193, AL031577, U73332, AC005913, AB017602, |
| | | | | | Z30993, Z84721, AL035252, AC005316, AL034402, AC004976, |
| | | | | | AP000356, AC005317, AL035410, AC005399, AC006079, AC006162, |
| | | | | | AC008079, AL031676, Z95331, AC003070, AC004596, Z98052, |
| | | | | | AL024498, AP000116, AC004817, AL008637, AC005102, Z99943, |
| | | | | | AL022476, AL136295, AC007542, AJ251973, AC005011, AL079295, |
| | | | | | AL121653, AL049697, AL008718, AC004531, AC006965, AC004955, |
| | | | | | AL121658, AC005007, AC006427, AC004782, AC006211, AL109827, |
| | | | | | AC006042, AC006084, AC006088, AC007064, AC005839, AC005778, |
| | | | | | AL022396, AC004032, Z49235, and AC008040. |
| HWLKJ03 | 160 | 922371 | 1-520 | 15-534 | AA902430, AI681252, AI879991, AL080276, and AF202257. |
| HWLJW12 | 161 | 969556 | 1-560 | 15-574 | AW054698, AA642512, AI378060, AA494486, AA536108, AI823838, |
| | | | | | AA502907, W56244, AI963205, AA663127, AA587968, AI859142, |
| | | | | | AW069188, N23036, AI024942, and AL117639. |
| HWLJW11 | 162 | 924518 | 1-500 | 15-514 | W60263, AA781074, AA004225, AI698018, W04286, AA235149, |
| | | | | | AI948978, AA977744, AW013825, AW301584, AI719432, W60314, |
| | | | | | AW392370, AI678934, AA747067, AA746945, AA234751, AW382644, |
| | | | | | AA654607, AI349272, AA307294, AA307292, and AC004985. |
| HWLJU91 | 163 | 789882 | 1-501 | 15-515 | AI660842, AA132964, T70354, AA587170, AI473318, AW339181, and |
| | | | | | AI471705. |
| HWLJP28 | 164 | 925655 | 1-440 | 15-454 | N95385, AW083800, AA996318, AI271604, AI084115, AA854349, |
| | | | | | AW276544, AW247346, AI373017, AW001509, AA195247, AI139246, |
| | | | | | AI139463, AI066681, AI066683, AI884736, AI948653, AA463989, |
| | | | | | AA243640, AI188854, AW001474, AA973976, AA514447, AI523850, |
| | | | | | AI082808, AI223410, AI288210, AW246721, AI870011, AA861211, |
| | | | | | AI471823, AI693037, AA421035, AI086153, AI768262, AW005672, |
| | | | | | AI159904, AA515681, AI621122, AI379956, AW196296, AI697046, |
| | | | | | AW054883, AI208302, AI359604, AA176600, AI634195, AW341997, |
| | | | | | AI298008, AA148653, H23135, AA481989, AW069378, AA176960, |
| | | | | | AA399227, AI351955, AI202782, AA906678, AA258378, W74136, |
| | | | | | AI589127, AA745713, AA706773, H39661, AA828210, AA481999, |
| | | | | | W79674, AI183872, AI272018, AA768685, AA176831, AA977112, |
| | | | | | T33485, AA989448, Z41804, AI359380, AA368962, AA865669, |
| | | | | | AA975159, H89978, AI432354, AI911220, AI015167, AI418891, |
| | | | | | AI383671, F26818, F17274, AI972992, AA748828, AA458602, AI865762, |
| | | | | | F03711, AA599652, D19842, AW388587, AA291674, AA292183, |
| | | | | | AA975485, F29808, AA481856, AA481836, AA421034, AI219176, |
| | | | | | AA405298, AI362948, AL133634, AF159063, and AF112215. |
| HWLJM40 | 165 | 710519 | 1-546 | 15-560 | W60827, and AL047234. |
| HWLJK01 | 166 | 914089 | 1-616 | 15-630 | AA746173. |
| HWLIS95 | 167 | 795416 | 1-255 | 15-269 | AI699874, H51304, AI783850, R18531, AI690301, H51898, H02058, |
| | | | | | AA761876, AA769559, AA601182, AA485941, AA634147, AA374166, |
| | | | | | R60198, T47172, AI124664, AA314294, R79025, AA468322, AI027602, |
| | | | | | AI925653, AA305334, AA487500, AW195949, AI922828, AA708021, |
| | | | | | AA069589, AA059369, F00487, AA632845, AA745581, AI924702, |
| | | | | | AL040573, AA032022, AA031911, AA312605, AA429675, AI014920, |
| | | | | | AA324750, AA664564, AA555313, AA907537, Z99496, AC005279, |
| | | | | | AC005567, AL050312, AC002312, AC005288, AC002310, AL049548, |
| | | | | | AC006196, AC004491, AC005808, AC009479, AL022318, AC002350, |
| | | | | | AC006374, AC006449, AC004707, AC005296, AC010077, AF064861, |
| | | | | | AC002299, AC005393, AC005327, AC005668, AC003036, Z93241, |
| | | | | | AC006031, AC005783, AC005572, AL008720, AL031577, AL035458, |
| | | | | | AC004905, AP000510, AB023048, AC007015, AL118507, AF126403, |
| | | | | | AL031848, AC005015, AL031054, AL021407, AC006077, AL121578, |
| | | | | | AL049631, AF053356, AC003960, AC006359, AC002554, AC002451, |
| | | | | | AP000563, AC004813, AC008044, AC003103, AL008582, AC006597, |
| | | | | | AC004217, AC006505, AL008583, AC002559, AL121603, AL109829, |
| | | | | | AC007227, AC005875, AC016830, AF198098, AC007435, AL033533, |
| | | | | | AC006071, AL080317, Z99495, AL133321, AC006390, AJ239318, |
| | | | | | AL035695, AL049776, AC005187, AL024474, AC009247, AC006163, |
| | | | | | AC002300, AF023268, AL031120, AC006042, AC016027, AF130343, |
| | | | | | AC004934, Z83846, Z68289, AF111168, AC006132, AC004620, |
| | | | | | AC009731, AC006947, AC002429, AL122003, AL139054, AC006486, |
| | | | | | AC004838, AC006361, AC002470, AB016897, and AC004072. |
| HWLIG05 | 168 | 928226 | 1-384 | 15-398 | AA055095. |
| HWLID27 | 169 | 682563 | 1-482 | 15-496 | H01418, and AL109758. |
| HWLHW01 | 170 | 915161 | 1-530 | 15-544 | AA923671, AI125697, and AC007239. |
| HWLHU03 | 171 | 922931 | 1-522 | 15-536 | AA078565, and AC005071. |
| HWLHK09 | 172 | 949288 | 1-777 | 15-791 | AA740397, AI434125, AW136838, AA569863, AW105266, AI204298, |
| | | | | | W96043, AA716410, AI350484, AW290890, AW148513, AA447782, |
| | | | | | T53415, AI536855, T53416, R60197, AI984348, AI686362, AI248525, |
| | | | | | AW250847, AI992202, AI143894, AI992194, AI475478, AI805451, |
| | | | | | AI497917, AI131385, AI537372, AL138451, AW050818, AI188044, |
| | | | | | AI341988, AI092923, AI422529, AI470405, AI074107, AI761422, |
| | | | | | AI081852, AI240543, AA552656, AI741631, AA640107, W94806, |
| | | | | | AI709345, AI890651, AI741642, AA635765, AI000886, AA609560, |
| | | | | | R59720, AA279104, AA662394, AA960820, H43861, F26986, AI077909, |
| | | | | | AI266399, AW089381, AI022218, F33558, AW009700, AA454904, |
| | | | | | AA040893, W48641, N80191, AA029173, AA150947, D60131, |
| | | | | | AA018731, H08872, AI924093, N80837, H96895, AW408361, |
| | | | | | AA565574, AW090493, AW299693, AI799761, AI932812, AI800835, |
| | | | | | AI280339, AI798566, AA113310, T98488, AA161054, AW273622, |
| | | | | | AI653931, AI920904, AA720931, AA877404, AI276048, AI623560, |
| | | | | | C75200, AA654134, AI422772, AW134730, AW196781, AI583539, |
| | | | | | AI565141, AI689249, AA159367, AI800218, AI201482, T77050, |
| | | | | | AW193090, AI983710, AI306731, AI911743, AI346281, AI826240, |
| | | | | | AI312053, AA159139, AW193893, AW026429, AI955668, AW058431, |
| | | | | | AA150536, AI566956, AW264048, F09634, AI984335, AI031629, |
| | | | | | AA922838, AA983373, AI970021, W37151, AI610137, AI468182, |
| | | | | | AA828386, AI264211, AI023818, AA603941, T56771, AI659590, |
| | | | | | AA477573, AI050718, AA194496, AI701189, AI382466, H15148, |
| | | | | | AA565554, AI696419, AA159069, AW438920, AA496449, AA102717, |
| | | | | | AA248169, AA496515, AW024803, AW168713, AI955982, AW070799, |
| | | | | | AI244082, AI910614, AA526367, AA454830, W45378, AW129533, |
| | | | | | AW024804, AI766300, AA889374, N26161, AW176258, AW073374, |
| | | | | | AI362836, AA370818, and AL117551. |
| HWLHH62 | 173 | 876225 | 1-512 | 15-526 | R76336, AI290972, AW082282, AI815098, AI935867, AI659188, |
| | | | | | AI421829, AA974182, AW276067, AI889106, AI625318, AI636809, |
| | | | | | AW079674, AI559518, H12385, AI914585, AI342309, AI216199, |
| | | | | | AI336447, AI336445, AI476296, AA865622, AI301940, AI469758, |
| | | | | | AW251068, AI272699, AI832439, AW151910, AA573785, AI660665, |
| | | | | | AI333305, AI865986, AI688082, AA639087, D45438, R94963, C20912, |
| | | | | | AI908555, AA987621, H41084, AI590410, H70884, AI720940, H15022, |
| | | | | | AI274107, AA903732, AA935031, AW192993, AW132153, AI244423, |
| | | | | | AI199655, AI199654, AI832803, AA593195, AW269879, AA886276, |
| | | | | | AI110653, AI225252, AC006479, and AF115384. |
| HWLHD19 | 174 | 887203 | 1-618 | 15-632 | U46349, AW392670, AL119355, Z99396, AW372827, AL119483, |
| | | | | | AL119401, AW363220, AW384394, AL119341, U46351, AL119418, |
| | | | | | AL119319, AL119457, AL119396, AL119324, AL119443, AL134536, |
| | | | | | AL119522, AL134902, AL119484, AL119363, AL119391, AL119497, |
| | | | | | AL042984, U46346, U46350, U46347, AL119444, AL119335, AL119496, |
| | | | | | AL134525, AL037205, AL042433, AI142131, U46341, AL119464, |
| | | | | | AR060234, AR066494, A81671, AR069079, AR054110, and AB026436. |
| HWLGV14 | 175 | 967914 | 1-441 | 15-455 | R95048, H71284, AW250334, H39231, H15021, AA309046, R45920, |
| | | | | | AI110653, AF115384, and AC006479. |
| HWLGA04 | 176 | 925682 | 1-560 | 15-574 | AA805357, AW445088, AA457154, AA748596, and AA766556. |
| HWLFY91 | 177 | 789569 | 1-587 | 15-601 | T55064, AL119418, AL119484, AL119483, AL079683, AC006480, |
| | | | | | AC005585, AC004966, AC004031, and AC007786. |
| HWLFY06 | 178 | 934635 | 1-651 | 15-665 | AI828037, AI568552, AI911104, AI566345, AI768789, AA779329, |
| | | | | | AA693540, AA776299, and AW081695. |
| HWLFV52 | 179 | 950978 | 1-344 | 15-358 | AA446725, and AW452377. |
| HWLFQ39 | 180 | 705200 | 1-861 | 15-875 | R56641, R85020, T10207, R60097, Z43394, F11340, H28844, T66406, |
| | | | | | F06322, F12312, F11134, F05772, T80510, AI912281, AW419361, |
| | | | | | F06032, T06213, and AF070541. |
| HWLFM69 | 181 | 754644 | 1-547 | 15-561 | AA236233, and AA253152. |
| HWLFH36 | 182 | 708387 | 1-396 | 15-410 | AW025980, R63208, AW392670, U46347, AW384394, AL119484, |
| | | | | | AW363220, Z99396, AL119457, AW372827, AL119324, AL119319, |
| | | | | | AL043003, AL119497, AL119439, AL119391, AL119522, U46351, |
| | | | | | AL119363, AL119355, AL119443, AL119483, AL119341, U46350, |
| | | | | | U46341, AL119396, AL134528, U46349, AL119335, AL119496, |
| | | | | | AL119418, AL119444, AL037205, AL134530, AL134519, AL134531, |
| | | | | | AL119401, U46346, AL042614, AL134132, AL134533, AL043147, |
| | | | | | AL042984, AL042965, AL042975, AL042544, AL119399, AL134538, |
| | | | | | U46345, AL043033, AL043019, AL042542, AL043029, AL042450, |
| | | | | | AL042989, AL042551, AL134542, AL119464, AR066494, AR060234, |
| | | | | | A81671, AB026436, AR054110, AR023813, and AR069079. |
| HWLFB71 | 183 | 759915 | 1-758 | 15-772 | N99523, and AL035252. |
| HWLEZ11 | 184 | 966228 | 1-543 | 15-557 | T50894, AI565243, and AW197960. |
| HWLEQ61 | 185 | 741224 | 1-502 | 15-516 | R15994, Z39969, F04171, F03124, T40928, AI539854, AI146310, and |
| | | | | | T66620. |
| HWLEM80 | 186 | 886651 | 1-756 | 15-770 | Z99396, AW392670, AW372827, AL038837, AW384394, AL119484, |
| | | | | | AL119391, AW363220, AL119497, AL037051, AL036725, AL119319, |
| | | | | | U46349, AL119483, AL119355, AL036418, AL119522, AL119457, |
| | | | | | AL119443, AL119324, AL119363, U46350, AA631969, AL039074, |
| | | | | | U46341, U46351, AL119341, AL119335, AL036858, AL119496, |
| | | | | | AL119396, AL119439, AL119444, AL119418, U46347, AL036924, |
| | | | | | AI142137, AL042614, U46346, AL037205, AL134524, AL042984, |
| | | | | | U46345, AL134538, AL134531, AL134542, AL042965, AL042975, |
| | | | | | AL038509, AL134528, AL119399, AL134518, AL043029, AL042544, |
| | | | | | AL037085, AI142132, AL037094, AL042551, AL043019, AL037526, |
| | | | | | AL043033, AL036196, AL043011, AL037639, AL036190, AL042450, |
| | | | | | AL042542, AL037082, AL036767, AL038520, AL037077, AL043003, |
| | | | | | AL036268, AL119464, AL036774, AL036998, AL038851, AL038447, |
| | | | | | AL036238, AL036733, AL037027, AL037178, AL037615, AL036719, |
| | | | | | AL036679, AL036765, AL036191, AL036886, AR060234, A81671, |
| | | | | | AR066494, AR023813, AR064707, AR069079, AB026436, and |
| | | | | | AR054110. |
| HWLEM01 | 187 | 915547 | 1-366 | 15-380 | AI627456, AA935090, AA862195, AA761568, and AA886022. |
| HWLEL08 | 188 | 860161 | 1-675 | 15-689 | AI799364, AI254420, AI572717, AI869403, AI799472, AI811307, |
| | | | | | AI887247, AI831136, AA603709, AI244380, AW059713, AI802711, |
| | | | | | AI866741, AI631216, AI679959, AW242479, AI858310, AW104146, |
| | | | | | AI742026, AI691088, AI590787, AW079436, AI690946, AI589267, |
| | | | | | AI805638, AI499986, AI611743, AW083804, AA864406, AW265004, |
| | | | | | AI364788, AW152550, AI627988, AI648508, AW274355, AI890806, |
| | | | | | AI538764, AI696186, AI678762, AI073952, AA830821, AI683255, |
| | | | | | AI537735, AI874166, AI677797, AI554544, AI591412, AI285419, |
| | | | | | AI591081, AI536910, AI696626, AI864827, AI690449, AW088944, |
| | | | | | AW302924, AI624529, AI891157, AI679550, AW172723, AW193203, |
| | | | | | AI355277, AL040694, AI916419, AA829541, AW168503, AW084059, |
| | | | | | AW131999, AW088899, AI568138, AI288116, AI566630, AW263804, |
| | | | | | AI251830, AI289542, AW129271, AI867042, AI366549, AI636719, |
| | | | | | AW080205, W33163, AI446124, AI799650, AA983883, AI590423, |
| | | | | | AW090058, AI589993, AI678850, AI336575, AI537837, AW058233, |
| | | | | | R66759, AW193134, AI582871, AI963068, W46547, AI933992, |
| | | | | | AI632303, AI690312, AI433976, AW024889, AI288285, AI362637, |
| | | | | | AI473528, AI799657, AW403717, AA494167, AL046463, AI699255, |
| | | | | | AI677983, AI472536, AI288152, AI699011, AW161579, AI624668, |
| | | | | | AI564602, N74355, AW080214, AL036652, AW130863, AI783861, |
| | | | | | AW103371, AI921176, AI868831, AI950664, AW118414, AW021373, |
| | | | | | AI689420, AI678302, AI491710, AI368868, AI446605, AW409775, |
| | | | | | AW088144, AI540832, AI432040, AI280670, AI635464, AL040602, |
| | | | | | AI634450, AI539771, AI612843, AI567935, AI915576, AI857797, |
| | | | | | AI344928, AI537011, AI609594, AW131989, AI345737, AI345224, |
| | | | | | AI591074, AI619781, AI249946, AA760697, AI628324, AI432570, |
| | | | | | AW148621, AI345736, AI798258, AI539153, AI955906, AI553669, |
| | | | | | AI570966, AI336592, AL038575, AI890057, AW073697, AI874351, |
| | | | | | AI929108, AI620093, AW118373, AI311892, AI873638, AI567978, |
| | | | | | AI886055, AA908294, AI590761, AI292249, AI811845, AI912288, |
| | | | | | AI302559, AI590645, AI889839, AI888482, AI752007, AI805688, |
| | | | | | AI872159, AI344933, AW103228, AL038529, AI862324, AI886594, |
| | | | | | AI365256, AI669639, AI866082, AI148272, AI470293, AA806719, |
| | | | | | AI687568, AI866994, AI591057, AW192288, AI473598, AW085786, |
| | | | | | AW151847, AI250627, AI863256, AI446373, AI471662, AW090103, |
| | | | | | AI349933, AI573026, AW148716, AI307736, AI866608, AW268261, |
| | | | | | AW073898, AI436429, AI473451, AI306706, AW082532, AI537677, |
| | | | | | AW084097, AI249877, AI873644, AI872300, AI263584, AI609677, |
| | | | | | AI888621, AI612759, AI357599, AI539800, AI679179, AW104141, |
| | | | | | AI865320, AI242736, AI345253, AA848053, AW149876, AW079334, |
| | | | | | AL040241, AW089006, AW087938, AI289310, AI345677, AI500523, |
| | | | | | AI623682, AI560679, AW073699, A18777, S77771, A93016, AL137556, |
| | | | | | I48978, S79832, AF022363, AF132676, AF061836, AL137555, I89947, |
| | | | | | A08913, AF036941, I89931, AL122106, A08912, A08910, I49625, |
| | | | | | A08909, E15569, AR038854, AL133093, A08908, S76508, I89934, |
| | | | | | A08916, AC002467, X72387, AF106862, E15582, X93495, AL122123, |
| | | | | | AF118070, AL122050, I66342, U51587, AF078844, AL049938, I26207, |
| | | | | | AB025103, AF030513, X56039, AL133098, AL049452, S69510, A57389, |
| | | | | | AL137526, U92068, U95114, X55446, U96683, S68736, AF106657, |
| | | | | | AF182215, D83989, I89944, AR019470, AF143957, AL110221, A90832, |
| | | | | | AL117440, AL122118, AL049465, AL137537, AL133104, A08907, |
| | | | | | AF114170, AF118064, AR038969, AF051325, AL133645, AL122111, |
| | | | | | Z82022, AJ238278, X92070, AF017152, AL117578, AL122045, |
| | | | | | AL133077, AB029065, X53587, AL137539, AR034830, I96214, I09360, |
| | | | | | AL049460, U90884, I42402, AL110197, I17544, AL133557, AL080158, |
| | | | | | AL080127, AL133568, AL133014, AF185576, AF180525, AL117432, |
| | | | | | X96540, I22272, AL137276, I41145, E03348, X06146, AF065135, |
| | | | | | E03349, AF107847, AL133624, AR059958, AL117629, AL137294, |
| | | | | | U77594, X65873, AL133665, E02221, L04504, U72620, A58524, A58523, |
| | | | | | AL137300, AF111112, Y10080, AL080060, AF067790, AF012536, |
| | | | | | AL137429, AL133067, Y16258, Y16257, E02756, Y16256, AL137557, |
| | | | | | X87582, E05822, AL110196, AR000496, U39656, AL117626, AL137538, |
| | | | | | X84990, X59414, AF090886, AL137712, A45787, AL137495, AL080137, |
| | | | | | AL137705, AL137527, AL133619, AL050138, AF137367, X62773, |
| | | | | | AF000145, AJ012755, M92439, S78214, A18788, AC004686, X81464, |
| | | | | | U75932, S75997, AF113019, I48979, AF090934, Y16645, U67958, |
| | | | | | AF118090, AL080154, AF210052, AL110296, AF183393, AF153205, |
| | | | | | AF159615, AL117585, AL117649, AL137711, E07108, U87620, |
| | | | | | AF090903, AF125949, AL137488, AF032666, D83032, A08911, |
| | | | | | AF162270, E02152, AF207750, AL133637, AF100931, AL122049, |
| | | | | | AL080074, AL133081, U58996, AL096744, AL137547, AL050393, |
| | | | | | AL133606, Y08769, AL050277, AL117583, L13297, AF118092, |
| | | | | | AF026030, U00686, AF040751, A27171, AF016047, AL137463, |
| | | | | | AF169154, U00763, S61953, AL080086, AF119337, I18355, AF118094, |
| | | | | | X79812, I34392, E02253, U75370, AL133640, X80340, Z72491, X52128, |
| | | | | | AL049466, AF094480, AL122098, AB007812, J05032, U42031, |
| | | | | | AF113676, AF158248, U49434, AL137658, AF146568, U80742, U72621, |
| | | | | | AL133113, AL050092, X57961, AL133565, AF008439, AF081197, |
| | | | | | AF081195, AF002985, A21103, AL122110, AF028823, S78453, |
| | | | | | AF113689, and L19437. |
| HWLEK75 | 189 | 766928 | 1-621 | 15-635 | AA191612, H46176, AI479578, T79613, AI936360, and AC006006. |
| HWLEI57 | 190 | 734267 | 1-455 | 15-469 | AL041375, AA557945, AA911515, AA053463, AI310992, AI300818, |
| | | | | | AI250552, AI251034, AI254770, AI284543, AI054090, AA503019, |
| | | | | | AA206707, AI251284, AI251203, AI249853, AL044701, AI623364, |
| | | | | | AA788592, AA630535, F17537, AW303098, T54783, AA493808, |
| | | | | | AA135761, AA736713, AW084004, H27165, AI572680, AA364082, |
| | | | | | N49298, AW276678, AA480486, AA580251, AA469230, AA832016, |
| | | | | | AI524193, Z84474, AC004883, AC000353, AC007664, AL121603, |
| | | | | | AC005821, U78027, AJ246003, AL109627, AL132712, AC007308, |
| | | | | | AF053356, AC005225, AL031681, AP000694, AC007371, AL031848, |
| | | | | | AC006211, AC004797, AC005280, AC002310, AC005015, AC005755, |
| | | | | | U95740, AC005902, AL049538, AC005736, AC005696, AF129756, |
| | | | | | AC002470, AC005913, AC004019, AC005670, AC006966, AL133245, |
| | | | | | AF109907, AC006285, AL035681, AL049780, AL121757, AC005519, |
| | | | | | AF030453, AC006449, AC007055, AL121655, AC006126, AC004144, |
| | | | | | AL021707, AC004975, AL096701, Z84469, U85195, AC007227, |
| | | | | | AL035422, AL035684, AC000026, AF165926, AC005527, AC004813, |
| | | | | | AL133448, AC004099, AL009181, AC005089, AB003151, AC003029, |
| | | | | | AC004814, AC005695, AL050341, AL031255, AC005940, AC004477, |
| | | | | | AL034417, AL034347, AE000658, AL020995, AC002059, AC004686, |
| | | | | | AC016027, AC020663, AC005049, AC002492, AC016830, AP000501, |
| | | | | | AC007216, AC004526, AF181896, AC006511, AC005694, AL022726, |
| | | | | | AC004878, AL022326, AL031295, AC004491, AC006450, AL139054, |
| | | | | | AC005288, U62293, AC006396, AC006487, AC000159, AC004967, |
| | | | | | AC005412, AP000030, L78833, AP000116, AC007151, AL109801, |
| | | | | | AC005041, AL022336, AC005375, AC004816, AP000555, AC018633, |
| | | | | | AC004983, AL031767, AC005529, AL050318, AL078476, AC002477, |
| | | | | | AF205588, AP000212, AP000134, AL122020, AL121754, AC005057, |
| | | | | | AL031133, AL022320, Z83844, AL031311, AC007688, Z98047, |
| | | | | | AC000111, AL031659, U80017, AC016025, AC004079, AL049631, |
| | | | | | AL031733, AL022165, AL035458, AC005823, AC000120, AL008719, |
| | | | | | AL031673, AL024498, AC006480, AL049697, AC004890, AL049776, |
| | | | | | AL022323, Z95113, AC006115, AL035398, AC002316, AC002544, |
| | | | | | AC005808, AF001549, L44140, AL109758, U47924, AC006057, Z99716, |
| | | | | | AC007536, AC005399, AC007406, AJ003147, AC005740, AC004098, |
| | | | | | AC004938, AC004263, AL133353, AL033392, AC004448, AC005899, |
| | | | | | AB016897, AC006111, AC004150, AC007917, AC005261, AC006116, |
| | | | | | AL034420, AL117337, AP000245, AP001053, Z94056, AP000553, |
| | | | | | AC006538, AC005531, AC007225, AL031431, AF111168, AC004659, |
| | | | | | AC005971, AL049743, AC006597, AC006312, AC006441, AC004149, |
| | | | | | AF196969, AC005697, AF134726, AL034549, AC006023, AP000503, |
| | | | | | AC007537, and AC007546. |
| HWLEH70 | 191 | 874721 | 1-590 | 15-604 | W95010, AW374112, AA040829, AA836635, AA970717, AA314614, |
| | | | | | AA452356, AA476400, AW024516, AW129435, AI092491, AW072060, |
| | | | | | AI189134, AI150134, AA699453, AI263271, AA761739, AA703279, |
| | | | | | AA777528, AI342713, AA872292, AA843158, AI306603, AA844071, |
| | | | | | AI313465, AI301275, AA700663, AI032928, AA694526, AI040112, |
| | | | | | AA029630, AI802249, AI199009, AA776987, AA603711, AI720350, |
| | | | | | AA581863, AA034078, H68850, AA001365, N29685, AA092097, |
| | | | | | N89776, AA453539, AA775544, T62617, AI365084, AA877094, W52538, |
| | | | | | AA612919, AA029629, AW178377, T78021, R99078, AI080297, |
| | | | | | AA004832, AI620227, H01073, AI216849, N27222, AA039446, W01129, |
| | | | | | AI310514, H83755, AA380107, AI051240, AA361143, AA115074, |
| | | | | | AI290791, AI859418, AI859411, AI986177, AI084639, AA039371, |
| | | | | | AA777506, AA507629, AI675135, AI886105, W17298, AA887931, |
| | | | | | AA702656, AA232398, N56695, N56643, AI042295, AA173895, |
| | | | | | AA173539, AI458814, R99621, AA769877, H04197, N89377, W93148, |
| | | | | | AA824483, AI858388, AW070969, AA352755, AA677474, AA808719, |
| | | | | | AA516411, AI493901, AI478868, AI034012, AI340978, AI688193, |
| | | | | | AI128512, N30311, AA814454, AI969239, AW169015, AI090574, |
| | | | | | AA873007, AI079514, N52956, AA452133, AA937208, and AA465533. |
| HWLEF27 | 192 | 682572 | 1-256 | 15-270 | R13584, and AB011117. |
| HWLEA48 | 193 | 927676 | 1-415 | 15-429 | AA130828, AF169034, Z98752, and AF169033. |
| HWLDX03 | 194 | 922806 | 1-568 | 15-582 | AL133990, AI829770, AA505700, and AI128582. |
| HWLDB04 | 195 | 887051 | 1-493 | 15-507 | AW117683. |
| HWLCM06 | 196 | 934117 | 1-459 | 15-473 | AI818839, and AA557932. |
| HWLCG42 | 197 | 975246 | 1-672 | 15-686 | AW075378, AL119483, AL119444, AL119484, AC006101, and U91323. |
| HWLCD10 | 198 | 974071 | 1-473 | 15-487 | AW392670, U46347, AL043003, Z99396, AL119457, AL134528, |
| | | | | | AW363220, AW384394, AL043033, U46351, AL119324, AL119444, |
| | | | | | AL119363, AL134533, AL134531, AL119497, AI142132, AL043147, |
| | | | | | AL134132, AL042450, AR054110, and AR066494. |
| HWLBO06 | 199 | 934630 | 1-306 | 15-320 | AI628414, AW190183, AA505080, C21450, AA629929, and AA725256. |
| HWLBN90 | 200 | 787355 | 1-597 | 15-611 | AA194905, AA164603, and AF155115. |
| HWLBL75 | 201 | 766877 | 1-634 | 15-648 | AW005748, AA923548, AA287724, AA046075, AA280716, AI215902, |
| | | | | | AA579688, N94002, AA046023, AI766599, AA740808, T92453, |
| | | | | | AA287725, T91495, AI540782, AA489673, AA281431, AW172264, |
| | | | | | AW419052, AC005667, and AC005206. |
| HWLBI01 | 202 | 919168 | 1-329 | 15-343 | T84925, AI453533, AA662451, AI797910, AI863269, W49529, |
| | | | | | AA969280, AA909645, AW016106, AA704629, AI217567, AA253458, |
| | | | | | AI583564, AI268910, AI261516, AI223214, AI080077, W49530, |
| | | | | | AW452178, AI423758, AI685699, AW264194, AI424097, AI494222, |
| | | | | | AA161335, AA861082, AI359963, AI278825, AI087203, AI292023, |
| | | | | | AI348189, AI422074, AI356252, AI700817, AW003844, AA833762, |
| | | | | | AA437126, AA765993, W56681, AI240846, AI933190, AA777656, and |
| | | | | | AF053356. |
| HWLAU04 | 203 | 953433 | 1-277 | 15-291 | AI014455, AI816843, AI934427, AW207409, AA594108, AW439577, |
| | | | | | AI921123, AI818217, AW301697, AI128260, AW270896, AW243099, |
| | | | | | AI923407, AI304364, R44786, AI269569, AI022996, AI962499, |
| | | | | | AW205076, AA860774, AI023565, AI675320, AW236056, AA846210, |
| | | | | | H20525, AL043236, AA189144, AW188621, AA398933, AI682364, |
| | | | | | AI869776, AI972233, AI436782, AI097649, AA492565, AW194337, |
| | | | | | AW337725, AW150303, AI911832, AI783975, AA427732, AA976448, |
| | | | | | AI423327, AA705924, AA122228, AI933805, AA029379, AI272795, |
| | | | | | AW276106, AI049990, AI679079, AA678767, AI863602, AW235480, |
| | | | | | AA610003, AI307297, AI401790, AA426384, AW339352, AI832158, |
| | | | | | W61155, AA299998, R50517, AI766939, AW237533, AW292612, |
| | | | | | AI800262, R56910, AI480367, R62414, AI363258, AI880530, |
| | | | | | AW237296, AA434297, N75586, F09963, R80409, AW242309, |
| | | | | | AW051761, H84210, T81795, W61203, AI872364, AA029378, |
| | | | | | AA121106, R62413, W07269, AI695106, T72570, N79770, AI142598, |
| | | | | | AA910677, T82115, AF105365, and AL117433. |
| HWLAQ11 | 204 | 966207 | 1-554 | 15-568 | AI801975, AI698139, AI681600, and T24770. |
| HWLAL10 | 205 | 971666 | 1-438 | 15-452 | AI453678. |
| HWLAC70 | 206 | 775771 | 1-428 | 15-442 | AI983434, AW341645, R86046, AI370387, AI582925, AA860287, |
| | | | | | AA931253, AW242845, AI355711, AI003805, AI674918, AI953136, |
| | | | | | AI439138, N30181, W74524, AI342466, N48608, AI203795, AA406573, |
| | | | | | AI916617, AI433905, AI590313, R77949, AI565402, AA411759, |
| | | | | | AW242806, AI918584, AI263073, and AI375289. |
| HWLAC29 | 207 | 690263 | 1-363 | 15-377 | AI200957, AI371025, AI362183, AA765552, AW058085, AW134520, |
| | | | | | AI635734, R91403, H68404, AA648201, R02100, and AI494370. |
| HWLAB74 | 208 | 765196 | 1-522 | 15-536 | H23551, AI376191, AI129920, AI424576, AA478517, H23995, H10292, |
| | | | | | H10851, and H10852. |
| HRTAR64 | 209 | 575020 | 1-363 | 15-377 | H45355, H49666, AA372974, N70354, AI909890, AA442334, R89350, |
| | | | | | AW062319, and N55639. |
| HRTAR31 | 210 | 698417 | 1-336 | 15-350 | AA372947, N44034, and Z96074. |
| HRTAP73 | 211 | 560932 | 1-589 | 15-603 | |
| HRTAN72 | 212 | 766328 | 1-247 | 15-261 | AA372711, AA372710, AI524360, AA603323, AL037910, AW377756, |
| | | | | | AA508478, AA584125, AA878149, W42588, AA339692, AI953764, |
| | | | | | AL038533, AA228349, AI818770, AA094320, AA371620, AA664320, |
| | | | | | AI637960, AA321392, AA829154, AA828739, N84446, N94011, |
| | | | | | AW076090, AF109907, AL050331, AC006559, AC005844, AL035467, |
| | | | | | AF049895, AL050348, AL031289, AL023799, AC004525, AC000052, |
| | | | | | AL117258, Z95114, U73169, AC006064, AC005690, AC004612, |
| | | | | | AF069291, AC005189, AC004702, AB020866, AL121694, AC006449, |
| | | | | | AC007077, AC005632, AL096712, AC004558, AC004983, U91326, |
| | | | | | AF001550, AF134726, AB023050, AP000547, AC005726, AC005293, |
| | | | | | Z97184, AC006167, AP000502, AC004812, Z98949, AC005669, |
| | | | | | AP000511, AC005479, AL049589, AC002544, AD000092, AC006251, |
| | | | | | AC003101, AC007687, AP000235, AP000148, AC004783, AL049694, |
| | | | | | AC004590, AL133245, AC004813, AC009514, AJ133269, AC005209, |
| | | | | | AL031274, AL021578, U95742, AC004821, S56773, AC004078, Z98051, |
| | | | | | AC004880, AC004230, AL050402, AL110502, U91321, AP000884, and |
| | | | | | AC007216. |
| HRTAN70 | 213 | 524889 | 1-263 | 15-277 | AA372707. |
| HRTAN65 | 214 | 753913 | 1-467 | 15-481 | W02953, AA372702, AA059274, Z44368, and AA527005. |
| HRTAN23 | 215 | 675124 | 1-273 | 15-287 | AA372600, H57420, and Z69922. |
| HRTAE57 | 216 | 871385 | 1-479 | 15-493 | T84441, T87483, H10262, T87081, AA227870, AI142241, AI142239, |
| | | | | | AI142363, R34809, W31798, AA056667, AA131958, Z44312, W19601, |
| | | | | | N73145, W95957, W95790, AA076461, AA372457, T30672, AA172239, |
| | | | | | AI207438, T34511, N45246, W23814, Z44333, AA044187, AA151085, |
| | | | | | AW362870, AF201947, and AF082526. |
| HRTAD37 | 217 | 708782 | 1-410 | 15-424 | AI033098, N51040, AA248728, and AA372391. |
| HOCNF65 | 218 | 859585 | 1-521 | 15-535 | H23470, AL041560, AI380171, AW297334, AW206916, AI421917, |
| | | | | | AA621171, AW296685, H47027, AI140475, AI361272, AI652621, |
| | | | | | AW207643, Z38296, H46488, AL041559, H17831, and F01565. |
| HGAMC08 | 219 | 958490 | 1-339 | 15-353 | AA515512, and AC008174. |
| HCNSR78 | 220 | 773818 | 1-178 | 15-192 | N78194. |
| HCNSR32 | 221 | 699694 | 1-446 | 15-460 | R80459, and R38126. |
| HCNSE03 | 222 | 925492 | 1-823 | 15-837 | AA489166, AI339427, AA807127, AW241274, AI365109, and |
| | | | | | AA700583. |
| HCNDV73 | 223 | 764119 | 1-382 | 15-396 | AA837403, and AA019730. |
| HCNDV41 | 224 | 862324 | 1-439 | 15-453 | AA602473. |
| HCNDK37 | 225 | 706359 | 1-472 | 15-486 | W74405. |
| HCNDF65 | 226 | 747499 | 1-424 | 15-438 | R09546. |
| HCNDB86 | 227 | 785168 | 1-512 | 15-526 | AW009761, AI688403, and T98293. |
| HCNCX91 | 228 | 789556 | 1-177 | 15-191 | T67235. |
| HCNCX27 | 229 | 682479 | 1-470 | 15-484 | T92888, and AA669377. |
| HCNCT03 | 230 | 923344 | 1-462 | 15-476 | AI281597. |
| HCNCO59 | 231 | 738889 | 1-403 | 15-417 | H91161. |
| HCNCM79 | 232 | 892693 | 1-473 | 15-487 | AA553959, AI948903, AI983767, AI832391, AI831407, AI833297, |
| | | | | | AA587764, AW134688, AI304380, AI813445, AI283185, AA938765, |
| | | | | | AI336470, AA857922, AI339648, AW206923, AI832498, AI744428, |
| | | | | | AI833021, AI336626, AA534511, AI732376, AI732377, AI285352, |
| | | | | | AI864896, AA422086, AW361498, AW361500, AW361502, AI766378, |
| | | | | | AI246768, AI833288, AW351854, AA535314, AW361503, AA422178, |
| | | | | | AI720988, T25111, AA283751, and AW351839. |
| HCNCF19 | 233 | 668043 | 1-452 | 15-466 | H73183, AW378939, AI242654, AI083578, AA203154, AI266074, and AA708327. |
| HCNAZ20 | 234 | 670031 | 1-327 | 15-341 | R85819, AI732227, AA572686, and AA579567. |
| HCNAY45 | 235 | 716992 | 1-610 | 15-624 | H85187, AA570563, H63548, H84654, H17549, AI971577, R83433, and |
| | | | | | AC006481. |
| HCNAT92 | 236 | 518899 | 1-334 | 15-348 | AI796024. |
| HCNAT67 | 237 | 508295 | 1-260 | 15-274 | N38991, AA728939, AA715348, AC006509, AC002350, AL031311, |
| | | | | | AF190465, AL021937, AP001050, AC005089, AC006160, AC005778, |
| | | | | | AL022721, AP000104, Z82172, and AC003026. |
| HCNAQ26 | 238 | 685199 | 1-570 | 15-584 | AA196782, and AA327410. |
| HCNAP29 | 239 | 855685 | 1-441 | 15-455 | AA327299, AA283045, and AC004382. |
| HCNAL30 | 240 | 522672 | 1-114 | 15-128 | AC004519. |
| HCNAK11 | 241 | 967945 | 1-607 | 15-621 | AA327226, T87318, AA699663, AA723867, and AC003991. |
| HCNAA41 | 242 | 791545 | 1-558 | 15-572 | AA033945, AA525921, AA524609, AA225192, AA327031, AA856847, |
| | | | | | R85107, AW075801, AI584030, AA873521, AI222713, and AC004924. |

[0095] TABLE 4

| Code | Description | Tissue | Organ | Cell Line | Disease | Vector |
|---|---|---|---|---|---|---|
| AR022 | a_Heart | a_Heart | | | | |
| AR023 | a_Liver | a_Liver | | | | |
| AR024 | a_mammary gland | a_mammary gland | | | | |
| AR025 | a_Prostate | a_Prostate | | | | |
| AR026 | a_small_intestine | a_small intestine | | | | |
| AR027 | a_Stomach | a_Stomach | | | | |
| AR028 | Blood B cells | Blood B cells | | | | |
| AR029 | Blood B cells activated | Blood B cells | | | | |
| | | activated | | | | |
| AR030 | Blood B cells resting | Blood B cells | | | | |
| | | resting | | | | |
| AR031 | Blood T cells activated | Blood T cells | | | | |
| | | activated | | | | |
| AR032 | Blood T cells resting | Blood T cells | | | | |
| | | resting | | | | |
| AR033 | brain | brain | | | | |
| AR034 | breast | breast | | | | |
| AR035 | breast cancer | breast cancer | | | | |
| AR036 | Cell Line CAOV3 | Cell Line CAOV3 | | | | |
| AR037 | cell line PA-1 | cell line PA-1 | | | | |
| AR038 | cell line transformed | cell line | | | | |
| | | transformed | | | | |
| AR039 | colon | colon | | | | |
| AR040 | colon (9808co65R) | colon (9808co65R) | | | | |
| AR041 | colon (9809co15) | colon (9809co15) | | | | |
| AR042 | colon cancer | colon cancer | | | | |
| AR043 | colon cancer | colon cancer | | | | |
| | (9808co64R) | (9808co64R) | | | | |
| AR044 | colon cancer 9809co14 | colon cancer | | | | |
| | | 9809co14 | | | | |
| AR045 | corn clone 5 | corn clone 5 | | | | |
| AR046 | corn clone 6 | corn clone 6 | | | | |
| AR047 | corn clone2 | corn clone2 | | | | |
| AR048 | corn clone3 | corn clone3 | | | | |
| AR049 | Corn Clone4 | Corn Clone4 | | | | |
| AR050 | Donor II B Cells 24 hrs | Donor II B Cells | | | | |
| | | 24 hrs | | | | |
| AR051 | Donor II B Cells 72 hrs | Donor II B Cells | | | | |
| | | 72 hrs | | | | |
| AR052 | Donor II B-Cells 24 | Donor II B-Cells | | | | |
| | hrs. | 24 hrs. | | | | |
| AR053 | Donor II B-Cells 72 hrs | Donor II B-Cells | | | | |
| | | 72 hrs | | | | |
| AR054 | Donor II Resting B | Donor II Resting B | | | | |
| | Cells | Cells | | | | |
| AR055 | Heart | Heart | | | | |
| AR056 | Human Lung | Human Lung | | | | |
| | (clonetech) | (clonetech) | | | | |
| AR057 | Human Mammary | Human Mammary | | | | |
| | (clontech) | (clontech) | | | | |
| AR058 | Human Thymus | Human Thymus | | | | |
| | (clonetech) | (clonetech) | | | | |
| AR059 | Jurkat (unstimulated) | Jurkat | | | | |
| | | (unstimulated) | | | | |
| AR060 | Kidney | Kidney | | | | |
| AR061 | Liver | Liver | | | | |
| AR062 | Liver (Clontech) | Liver (Clontech) | | | | |
| AR063 | Lymphocytes chronic | Lymphocytes | | | | |
| | lymphocytic leukaemia | chronic | | | | |
| | | lymphocytic | | | | |
| | | leukaemia | | | | |
| AR064 | Lymphocytes diffuse | Lymphocytes | | | | |
| | large B cell lymphoma | diffuse large B cell | | | | |
| | | lymphoma | | | | |
| AR065 | Lymphocytes follicular | Lymphocytes | | | | |
| | lymphoma | follicular | | | | |
| | | lymphoma | | | | |
| AR066 | normal breast | normal breast | | | | |
| AR067 | Normal Ovarian | Normal Ovarian | | | | |
| | (4004901) | (4004901) | | | | |
| AR068 | Normal Ovary | Normal Ovary | | | | |
| | 9508G045 | 9508G045 | | | | |
| AR069 | Normal Ovary | Normal Ovary | | | | |
| | 9701G208 | 97010208 | | | | |
| AR070 | Normal Ovary | Normal Ovary | | | | |
| | 9806G005 | 9806G005 | | | | |
| AR071 | Ovarian Cancer | Ovarian Cancer | | | | |
| AR072 | Ovarian Cancer | Ovarian Cancer | | | | |
| | (9702G001) | (9702G001) | | | | |
| AR073 | Ovarian Cancer | Ovarian Cancer | | | | |
| | (9707G029) | (9707G029) | | | | |
| AR074 | Ovarian Cancer | Ovarian Cancer | | | | |
| | (9804G011) | (9804G011) | | | | |
| AR075 | Ovarian Cancer | Ovarian Cancer | | | | |
| | (9806G019) | (9806G019) | | | | |
| AR076 | Ovarian Cancer | Ovarian Cancer | | | | |
| | (9807G017) | (9807G017) | | | | |
| AR077 | Ovarian Cancer | Ovarian Cancer | | | | |
| | (9809G001) | (9809G001) | | | | |
| AR078 | ovarian cancer 15799 | ovarian cancer | | | | |
| | | 15799 | | | | |
| AR079 | Ovarian Cancer | Ovarian Cancer | | | | |
| | 17717AID | 17717AID | | | | |
| AR080 | Ovarian Cancer | Ovarian Cancer | | | | |
| | 4004664B1 | 4004664B1 | | | | |
| AR081 | Ovarian Cancer | Ovarian Cancer | | | | |
| | 4005315A1 | 4005315A1 | | | | |
| AR082 | ovarian cancer | ovarian cancer | | | | |
| | 94127303 | 94127303 | | | | |
| AR083 | Ovarian Cancer | Ovarian Cancer | | | | |
| | 96069304 | 96069304 | | | | |
| AR084 | Ovarian Cancer | Ovarian Cancer | | | | |
| | 9707G029 | 9707G029 | | | | |
| AR085 | Ovarian Cancer | Ovarian Cancer | | | | |
| | 9807G045 | 9807G045 | | | | |
| AR086 | ovarian cancer | ovarian cancer | | | | |
| | 9809G001 | 9809G001 | | | | |
| AR087 | Ovarian Cancer | Ovarian Cancer | | | | |
| | 9905C032RC | 9905C032RC | | | | |
| AR088 | Ovarian cancer 9907 | Ovarian cancer | | | | |
| | C00 3rd | 9907 C00 3rd | | | | |
| AR089 | Prostate | Prostate | | | | |
| AR090 | Prostate (clonetech) | Prostate | | | | |
| | | (clonetech) | | | | |
| AR091 | prostate cancer | prostate cancer | | | | |
| AR092 | prostate cancer #15176 | prostate cancer | | | | |
| | | #15176 | | | | |
| AR093 | prostate cancer #15509 | prostate cancer | | | | |
| | | #15509 | | | | |
| AR094 | prostate cancer #15673 | prostate cancer | | | | |
| | | #15673 | | | | |
| AR095 | Small Intestine | Small Intestine | | | | |
| | (Clontech) | (Clontech) | | | | |
| AR096 | Spleen | Spleen | | | | |
| AR097 | Thymus T cells | Thymus T cells | | | | |
| | activated | activated | | | | |
| AR098 | Thymus T cells resting | Thymus T cells | | | | |
| | | resting | | | | |
| AR099 | Tonsil | Tonsil | | | | |
| AR100 | Tonsil geminal center | Tonsil geminal | | | | |
| | centroblast | center centroblast | | | | |
| AR101 | Tonsil germinal center | Tonsil germinal | | | | |
| | B cell | center B cell | | | | |
| AR102 | Tonsil lymph node | Tonsil lymph node | | | | |
| AR103 | Tonsil memory B cell | Tonsil memory B | | | | |
| | | cell | | | | |
| AR104 | Whole Brain | Whole Brain | | | | |
| AR105 | Xenograft ES-2 | Xenograft ES-2 | | | | |
| AR106 | Xenograft SW626 | Xenograft SW626 | | | | |
| H0085 | Human Colon | Human Colon | | | | Lambda |
| | | | | | | ZAP II |
| H0231 | Human Colon, | Human Colon | | | | pBluescript |
| | subtraction | | | | | |
| H0232 | Human Colon, | Human Colon | | | | pBluescript |
| | differential expression | | | | | |
| H0436 | Resting T-Cell | T-Cells | Blood | Cell Line | | pSport1 |
| | Library,II | | | | | |
| H0597 | Human Colon; re- | Human Colon | | | | Lambda |
| | excision | | | | | ZAP II |
| S0114 | Anergic T-cell | Anergic T-cell | | Cell Line | | Uni-ZAP |
| | | | | | | XR |
| S0354 | Colon Normal II | Colon Normal | Colon | | | pSport1 |
| S0358 | Colon Normal III | Colon Normal | Colon | | | pSport1 |
| S0374 | Normal colon | Normal colon | | | | pSport1 |
| S0408 | Colon, normal | Colon, normal | | | | pSport1 |
| S0442 | Colon Normal | Colon Normal | | | | pSport1 |
| T0008 | Colorectal Tumor | Colorectal Tumor | | | disease | pBluescript |
| | | | | | | SK- |
| L0021 | Human adult | | | | | |
| | (K. Okubo) | | | | | |
| L0138 | Human normal gingiva | normal gingiva | | | | |
| L0367 | NCI_CGAP_Sch1 | Schwannoma | | | | Bluescript |
| | | tumor | | | | SK- |
| L0369 | NCI_CGAP_AA1 | adrenal adenoma | adrenal | | | Bluescript |
| | | | gland | | | SK- |
| L0415 | b4HB3MA Cot8-HAP- | | | | | Lafmid BA |
| | Ft | | | | | |
| L0438 | normalized infant brain | total brain | brain | | | lafmid BA |
| | cDNA | | | | | |
| L0439 | Soares infant brain | | whole brain | | | Lafmid BA |
| | 1NIB | | | | | |
| L0471 | Human fetal heart, | | | | | Lambda |
| | Lambda ZAP Express | | | | | ZAP |
| | | | | | | Express |
| L0485 | STRATAGENE | skeletal muscle | leg muscle | | | Lambda |
| | Human skeletal muscle | | | | | ZAPII |
| | cDNA library, cat. | | | | | |
| | #936215. | | | | | |
| L0515 | NCI_CGAP_Ov32 | papillary serous | ovary | | | pAMP1 |
| | | carcinoma | | | | |
| L0517 | NCI_CGAP_Pr1 | | | | | pAMP10 |
| L0518 | NCI_CGAP_Pr2 | | | | | pAMP10 |
| L0526 | NCI_CGAP_Pr12 | metastatic prostate | | | | pAMP10 |
| | | bone lesion | | | | |
| L0529 | NCI_CGAP_Pr6 | prostate | | | | pAMP10 |
| L0533 | NCI_CGAP_HSC1 | stem cells | bone | | | pAMP10 |
| | | | marrow | | | |
| L0539 | Chromosome 7 | | placenta | | | pAMP10 |
| | Placental cDNA | | | | | |
| | Library | | | | | |
| L0558 | NCI_CGAP_Ov40 | endometrioid | ovary | | | pAMP10 |
| | | ovarian metastasis | | | | |
| L0592 | Stratagene hNT neuron | | | | | pBluescript |
| | (#937233) | | | | | SK- |
| L0596 | Stratagene colon | | colon | | | pBluescript |
| | (#937204) | | | | | SK- |
| L0599 | Stratagene lung | | lung | | | pBluescript |
| | (#937210) | | | | | SK- |
| L0601 | Stratagene pancreas | | pancreas | | | pBluescript |
| | (#937208) | | | | | SK- |
| L0604 | Stratagene muscle | muscle | skeletal | | | pBluescript |
| | 937209 | | muscle | | | SK- |
| L0605 | Stratagene fetal spleen | fetal spleen | spleen | | | pBluescript |
| | (#937205) | | | | | SK- |
| L0607 | NCI_CGAP_Lym6 | mantle cell | lymph node | | | pBluescript |
| | | lymphoma | | | | SK- |
| L0608 | Stratagene lung | lung carcinoma | lung | NCI-H69 | | pBluescript |
| | carcinoma 937218 | | | | | SK- |
| L0641 | NCI_CGAP_Col7 | juvenile granulosa | colon | | | pCMV- |
| | | tumor | | | | SPORT6 |
| L0646 | NCI_CGAP_Col4 | moderately- | colon | | | pCMV- |
| | | differentiated | | | | SPORT6 |
| | | adenocarcinoma | | | | |
| L0657 | NCI_CGAP_Ov23 | tumor, 5 pooled | ovary | | | pCMV |
| | | (see description) | | | | SPORT6 |
| L0662 | NCI_CGAP_Gas4 | poorly | stomach | | | pCMV- |
| | | differentiated | | | | SPORT6 |
| | | adenocarcinoma | | | | |
| | | with signet r | | | | |
| L0666 | NCI_CGAP_Ut1 | well-differentiated | uterus | | | pCMV- |
| | | endometrial | | | | SPORT6 |
| | | adenocarcinoma, 7 | | | | |
| L0717 | Gessler Wilms tumor | | | | | pSPORT1 |
| L0731 | Soares_pregnant_uterus_ | | uterus | | | pT7T3-Pac |
| | NbHPU | | | | | |
| L0738 | Human colorectal | | | | | pT7T3D |
| | cancer | | | | | |
| L0740 | Soares melanocyte | melanocyte | | | | pT7T3D |
| | 2NbHM | | | | | (Pharmacia) |
| | | | | | | with a |
| | | | | | | modified |
| | | | | | | polylinker |
| L0741 | Soares adult brain | | brain | | | pT7T3D |
| | N2b4HB55Y | | | | | (Pharmacia) |
| | | | | | | with a |
| | | | | | | modified |
| | | | | | | polylinker |
| L0742 | Soares adult brain | | brain | | | pT7T3D |
| | N2b5HB55Y | | | | | (Pharmacia) |
| | | | | | | with a |
| | | | | | | modified |
| | | | | | | polylinker |
| L0744 | Soares breast 3NbHBst | | breast | | | pT7T3D |
| | | | | | | (Pharmacia) |
| | | | | | | with a |
| | | | | | | modified |
| | | | | | | polylinker |
| L0745 | Soares retina N2b4HR | retina | eye | | | pT7T3D |
| | | | | | | (Pharmacia) |
| | | | | | | with a |
| | | | | | | modified |
| | | | | | | polylinker |
| L0747 | Soares_fetal_heart_Nb | | heart | | | pT7T3D |
| | HH19W | | | | | (Pharmacia) |
| | | | | | | with a |
| | | | | | | modified |
| | | | | | | polylinker |
| L0748 | Soares fetal liver spleen | | Liver and | | | pT7T3D |
| | 1NFLS | | Spleen | | | (Pharmacia) |
| | | | | | | with a |
| | | | | | | modified |
| | | | | | | polylinker |
| L0749 | Soares_fetal_liver_{—} | | Liver and | | | pT7T3D |
| | spleen_1NFLS_S1 | | Spleen | | | (Pharmacia) |
| | | | | | | with a |
| | | | | | | modified |
| | | | | | | polylinker |
| L0750 | Soares_fetal_lung_Nb | | lung | | | pT7T3D |
| | HL19W | | | | | (Pharmacia) |
| | | | | | | with a |
| | | | | | | modified |
| | | | | | | polylinker |
| L0751 | Soares ovary tumor | ovarian tumor | ovary | | | pT7T3D |
| | NbHOT | | | | | (Pharmacia) |
| | | | | | | with a |
| | | | | | | modified |
| | | | | | | polylinker |
| L0752 | Soares_parathyroid_{—} | parathyroid tumor | parathyroid | | | pT7T3D |
| | tumor_NbHPA | | gland | | | (Pharmacia) |
| | | | | | | with a |
| | | | | | | modified |
| | | | | | | polylinker |
| L0753 | Soares_pineal_gland_{—} | | pineal gland | | | pT7T3D |
| | N3HPG | | | | | (Pharmacia) |
| | | | | | | with a |
| | | | | | | modified |
| | | | | | | polylinker |
| L0754 | Soares placenta Nb2HP | | placenta | | | pT7T3D |
| | | | | | | (Pharmacia) |
| | | | | | | with a |
| | | | | | | modified |
| | | | | | | polylinker |
| L0756 | Soares_multiple_sclero- | multiple sclerosis | | | | pT7T3D |
| | sis_2NbHMSP | lesions | | | | (Pharmacia) |
| | | | | | | with a |
| | | | | | | modified |
| | | | | | | polylinker |
| | | | | | | V_TYPE |
| L0757 | Soares_senescent_fibro- | senescent | | | | pT7T3D |
| | blasts_NbHSF | fibroblast | | | | (Pharmacia) |
| | | | | | | with a |
| | | | | | | modified |
| | | | | | | polylinker |
| | | | | | | V_TYPE |
| L0758 | Soares_testis_NHT | | | | | pT7T3D- |
| | | | | | | Pac |
| | | | | | | (Pharmacia) |
| | | | | | | with a |
| | | | | | | modified |
| | | | | | | polylinker |
| L0759 | Soares_total_fetus_Nb | | | | | pT7T3D- |
| | 2HF8_9w | | | | | Pac |
| | | | | | | (Pharmacia) |
| | | | | | | with a |
| | | | | | | modified |
| | | | | | | polylinker |
| L0763 | NCI_CGAP_Br2 | breast | | | | pT7T3D- |
| | | | | | | Pac |
| | | | | | | (Pharmacia) |
| | | | | | | with a |
| | | | | | | modified |
| | | | | | | polylinker |
| L0764 | NCI_CGAP_Co3 | colon | | | | pT7T3D- |
| | | | | | | Pac |
| | | | | | | (Pharmacia) |
| | | | | | | with a |
| | | | | | | modified |
| | | | | | | polylinker |
| L0766 | NCI_CGAP_GCB1 | germinal center B | | | | pT7T3D- |
| | | cell | | | | Pac |
| | | | | | | (Pharmacia) |
| | | | | | | with a |
| | | | | | | modified |
| | | | | | | polylinker |
| L0768 | NCI_CGAP_GC4 | pooled germ cell | | | | pT7T3D- |
| | | tumors | | | | Pac |
| | | | | | | (Pharmacia) |
| | | | | | | with a |
| | | | | | | modified |
| | | | | | | polylinker |
| L0769 | NCI_CGAP_Brn25 | anaplastic | brain | | | pT7T3D- |
| | | oligodendroglioma | | | | Pac |
| | | | | | | (Pharmacia) |
| | | | | | | with a |
| | | | | | | modified |
| | | | | | | polylinker |
| L0770 | NCI_CGAP_Brn23 | glioblastoma | brain | | | pT7T3D- |
| | | (pooled) | | | | Pac |
| | | | | | | (Pharmacia) |
| | | | | | | with a |
| | | | | | | modified |
| | | | | | | polylinker |
| L0774 | NCI_CGAP_Kid3 | | kidney | | | pT7T3D- |
| | | | | | | Pac |
| | | | | | | (Pharmacia) |
| | | | | | | with a |
| | | | | | | modified |
| | | | | | | polylinker |
| L0775 | NCI_CGAP_Kid5 | 2 pooled tumors | kidney | | | pT7T3D- |
| | | (clear cell type) | | | | Pac |
| | | | | | | (Pharmacia) |
| | | | | | | with a |
| | | | | | | modified |
| | | | | | | polylinker |
| L0776 | NCI_CGAP_Lu5 | carcinoid | lung | | | pT7T3D- |
| | | | | | | Pac |
| | | | | | | (Pharmacia) |
| | | | | | | with a |
| | | | | | | modified |
| | | | | | | polylinker |
| L0777 | Soares_NhHMPu_S1 | Pooled human | mixed (see | | | pT7T3D- |
| | | melanocyte, fetal | below) | | | Pac |
| | | heart, and pregnant | | | | (Pharmacia) |
| | | | | | | with a |
| | | | | | | modified |
| | | | | | | polylinker |
| L0779 | Soares_NFL_T_GBC_{—} | | pooled | | | pT7T3D- |
| | S1 | | | | | Pac |
| | | | | | | (Pharmacia) |
| | | | | | | with a |
| | | | | | | modified |
| | | | | | | polylinker |
| L0783 | NCI_CGAP_Pr22 | normal prostate | prostate | | | pT7T3D- |
| | | | | | | Pac |
| | | | | | | (Pharmacia) |
| | | | | | | with a |
| | | | | | | modified |
| | | | | | | polylinker |
| L0787 | NCI_CGAP_Sub1 | | | | | pT7T3D- |
| | | | | | | Pac |
| | | | | | | (Pharmacia) |
| | | | | | | with a |
| | | | | | | modified |
| | | | | | | polylinker |
| L0789 | NCI_CGAP_Sub3 | | | | | pT7T3D- |
| | | | | | | Pac |
| | | | | | | (Pharmacia) |
| | | | | | | with a |
| | | | | | | modified |
| | | | | | | polylinker |
| L0794 | NCI_CGAP_GC6 | pooled germ cell | | | | pT7T3D- |
| | | tumors | | | | Pac |
| | | | | | | (Pharmacia) |
| | | | | | | with a |
| | | | | | | modified |
| | | | | | | polylinker |
| L0803 | NCI_CGAP_Kid11 | | kidney | | | pT7T3D- |
| | | | | | | Pac |
| | | | | | | (Pharmacia) |
| | | | | | | with a |
| | | | | | | modified |
| | | | | | | polylinker |
| L0805 | NCI_CGAP_Lu24 | carcinoid | lung | | | pT7T3D- |
| | | | | | | Pac |
| | | | | | | (Pharmacia) |
| | | | | | | with a |
| | | | | | | modified |
| | | | | | | polylinker |
| L0806 | NCI_CGAP_Lu19 | squamous cell | lung | | | pT7T3D- |
| | | carcinoma, poorly | | | | Pac |
| | | differentiated (4 | | | | (Pharmacia) |
| | | | | | | with a |
| | | | | | | modified |
| | | | | | | polylinker |
| L0809 | NCI_CGAP_Pr28 | | prostate | | | pT7T3D- |
| | | | | | | Pac |
| | | | | | | (Pharmacia) |
| | | | | | | with a |
| | | | | | | modified |
| | | | | | | polylinker |

[0096] TABLE 5

| OMIM | |
|---|---|
| Reference | Description |
| 107250 | Anterior segment mesenchymal dysgenesis |
| 123000 | Craniometaphyseal dysplasia |
| 126650 | Chloride diarrhea, congenital, Finnish type, 214700 |
| 126650 | Colon cancer |
| 154276 | Malignant hyperthermia susceptibility 3 |
| 173360 | Thrombophilia due to excessive plasminogen activator |
| | inhibitor |
| 173360 | Hemorrhagic diathesis due to PAI1 deficiency |
| 176261 | Jervell and Lange-Nielsen syndrome, 220400 |
| 181600 | Sclerotylosis |
| 189800 | Preeclampsia/eclampsia |
| 266300 | [Hair color, red] |
| 300011 | Menkes disease, 309400 |
| 300011 | Occipital horn syndrome, 304150 |
| 300011 | Cutis laxa, neonatal |
| 300127 | Mental retardation, X-linked, 60 |
| 305450 | FG syndrome |
| 309605 | Mental retardation, X-linked, syndromic-4, with congenital |
| | contractures and low fingertip arches |
| 313700 | Perineal hypospadias |
| 313700 | Prostate cancer |
| 313700 | Spinal and bulbar muscular atrophy of Kennedy, 313200 |
| 313700 | Breast cancer, male, with Reifenstein syndrome |
| 313700 | Androgen insensitivity, several forms |
| 314580 | Wieacker-Wolff syndrome |
| 600857 | Leigh syndrome |
| 601399 | Platelet disorder, familial, with associated myeloid |
| | malignancy |
| 602136 | Refsum disease, infantile, 266510 |
| 602136 | Zellweger syndrome-1, 214100 |
| 602136 | Adrenoleukodystrophy, neonatal, 202370 |
| 602447 | Coronary artery disease, susceptibility to |

[0097] Polynucleotide and Polypeptide Variants

[0098] The present invention is also directed to variants of the colon associated polynucleotide sequence disclosed in SEQ ID NO:X or the complementary strand thereto, nucleotide sequences encoding the polypeptide of SEQ ID NO:Y, the nucleotide sequence of SEQ ID NO:X encoding the polypeptide sequence as defined in column 6 of Table 1A, nucleotide sequences encoding the polypeptide as defined in column 6 of Table 1A, the nucleotide sequence as defined in columns 8 and 9 of Table 2, nucleotide sequences encoding the polypeptide encoded by the nucleotide sequence as defined in columns 8 and 9 of Table 2, the nucleotide sequence as defined in column 6 of Table 1B, nucleotide sequences encoding the polypeptide encoded by the nucleotide sequence as defined in column 6 of Table 1B, the cDNA sequence contained in Clone ID NO:Z, and/or nucleotide sequences encoding a polypeptide encoded by the cDNA sequence contained in Clone ID NO:Z.

[0099] The present invention also encompasses variants of the polypeptide sequence disclosed in SEQ ID NO:Y, a polypeptide sequence as defined in column 6 of Table 1A, a polypeptide sequence encoded by the polynucleotide sequence in SEQ ID NO:X, a polypeptide sequence encoded by the nucleotide sequence as defined in columns 8 and 9 of Table 2, a polypeptide sequence encoded by the nucleotide sequence as defined in column 6 of Table 1B, a polypeptide sequence encoded by the complement of the polynucleotide sequence in SEQ ID NO:X, and/or a polypeptide sequence encoded by the cDNA sequence contained in Clone ID NO:Z.

[0100] “Variant” refers to a polynucleotide or polypeptide differing from the polynucleotide or polypeptide of the present invention, but retaining essential properties thereof. Generally, variants are overall closely similar, and, in many regions, identical to the polynucleotide or polypeptide of the present invention.

[0101] Thus, one aspect of the invention provides an isolated nucleic acid molecule comprising, or alternatively consisting of, a polynucleotide having a nucleotide sequence selected from the group consisting of: (a) a nucleotide sequence described in SEQ ID NO:X or contained in the cDNA sequence of Clone ID NO:Z; (b) a nucleotide sequence in SEQ ID NO:X or the cDNA in Clone ID NO:Z which encodes a mature colon associated polypeptide; (c) a nucleotide sequence in SEQ ID NO:X or the cDNA sequence of Clone ID NO:Z, which encodes a biologically active fragment of a colon associated polypeptide; (d) a nucleotide sequence in SEQ ID NO:X or the cDNA sequence of Clone ID NO:Z, which encodes an antigenic fragment of a colon associated polypeptide; (e) a nucleotide sequence encoding a colon associated polypeptide having the complete amino acid sequence of SEQ ID NO:Y or the complete amino acid sequence encoded by the cDNA in Clone ID NO:Z; (f) a nucleotide sequence encoding a mature colon associated polypeptide of the amino acid sequence of SEQ ID NO:Y or the amino acid sequence encoded by the cDNA in Clone ID NO:Z; (g) a nucleotide sequence encoding a biologically active fragment of a colon associated polypeptide having the complete amino acid sequence of SEQ ID NO:Y or the complete amino acid sequence encoded by the cDNA in Clone ID NO:Z; (h) a nucleotide sequence encoding an antigenic fragment of a colon associated polypeptide having the complete amino acid sequence of SEQ ID NO:Y or the complete amino acid sequence encoded by the cDNA in Clone ID NO:Z; and (i) a nucleotide sequence complementary to any of the nucleotide sequences in (a), (b), (c), (d), (e), (f), (g), or (h), above.

[0102] The present invention is also directed to nucleic acid molecules which comprise, or alternatively consist of, a nucleotide sequence which is at least 80%, 85%, 90%, 95%, 96%, 97%, 98%, 99% or 100%, identical to, for example, any of the nucleotide sequences in (a), (b), (c), (d), (e), (f), (g), (h), or (i) above, the nucleotide coding sequence in SEQ ID NO:X or the complementary strand thereto, the nucleotide coding sequence of the cDNA contained in Clone ID NO:Z or the complementary strand thereto, a nucleotide sequence encoding the polypeptide of SEQ ID NO:Y, a nucleotide sequence encoding a polypeptide sequence encoded by the nucleotide sequence in SEQ ID NO:X, a polypeptide sequence encoded by the complement of the polynucleotide sequence in SEQ ID NO:X, a nucleotide sequence encoding the polypeptide encoded by the cDNA contained in Clone ID NO:Z, the nucleotide coding sequence in SEQ ID NO:X as defined in columns 8 and 9 of Table 2 or the complementary strand thereto, a nucleotide sequence encoding the polypeptide encoded by the nucleotide sequence in SEQ ID NO:X as defined in columns 8 and 9 of Table 2 or the complementary strand thereto, the nucleotide coding sequence in SEQ ID NO:B as defined in column 6 of Table 1B or the complementary strand thereto, a nucleotide sequence encoding the polypeptide encoded by the nucleotide sequence in SEQ ID NO:B as defined in column 6 of Table 1B or the complementary strand thereto, the nucleotide sequence in SEQ ID NO:X encoding the polypeptide sequence as defined in column 6 of Table 1A or the complementary strand thereto, nucleotide sequences encoding a polypeptide as defined in column 6 of Table 1A or the complementary strand thereto, and/or polynucleotide fragments of any of these nucleic acid molecules (e.g., those fragments described herein). Polynucleotides which hybridize to the complement of these nucleic acid molecules under stringent hybridization conditions or alternatively, under lower stringency conditions, are also encompassed by the invention, as are polypeptides encoded by these polynucleotides and nucleic acids.

[0103] In a preferred embodiment, the invention encompasses nucleic acid molecules which comprise, or alternatively, consist of a polynucleotide which hybridizes under stringent hybridization conditions, or alternatively, under lower stringency conditions, to a polynucleotide in (a), (b), (c), (d), (e), (f), (g), (h), or (i) above, as are polypeptides encoded by these polynucleotides. In another preferred embodiment, polynucleotides which hybridize to the complement of these nucleic acid molecules under stringent hybridization conditions or alternatively, under lower stringency conditions, are also encompassed by the invention, as are polypeptides encoded by these polynucleotides.

[0104] In another embodiment, the invention provides a purified protein comprising, or alternatively consisting of, a polypeptide having an amino acid sequence selected from the group consisting of: (a) the complete amino acid sequence of SEQ ID NO:Y or the complete amino acid sequence encoded by the cDNA in Clone ID NO:Z; (b) the amino acid sequence of a mature colon associated polypeptide having the amino acid sequence of SEQ ID NO:Y or the amino acid sequence encoded by the cDNA in Clone ID NO:Z; (c) the amino acid sequence of a biologically active fragment of a colon associated polypeptide having the complete amino acid sequence of SEQ ID NO:Y or the complete amino acid sequence encoded by the cDNA in Clone ID NO:Z; and (d) the amino acid sequence of an antigenic fragment of a colon associated polypeptide having the complete amino acid sequence of SEQ ID NO:Y or the complete amino acid sequence encoded by the cDNA in Clone ID NO:Z.

[0105] The present invention is also directed to proteins which comprise, or alternatively consist of, an amino acid sequence which is at least 80%, 85%, 90%, 95%, 96%, 97%, 98%, 99% or 100%, identical to, for example, any of the amino acid sequences in (a), (b), (c), or (d), above, the amino acid sequence shown in SEQ ID NO:Y, the amino acid sequence encoded by the cDNA contained in Clone ID NO:Z, the amino acid sequence of the polypeptide encoded by the nucleotide sequence in SEQ ID NO:X as defined in columns 8 and 9 of Table 2, the amino acid sequence of the polypeptide encoded by the nucleotide sequence in SEQ ID NO:B as defined in column 6 of Table 1B, the amino acid sequence as defined in column 6 of Table 1A, an amino acid sequence encoded by the nucleotide sequence in SEQ ID NO:X, and an amino acid sequence encoded by the complement of the polynucleotide sequence in SEQ ID NO:X. Fragments of these polypeptides are also provided (e.g., those fragments described herein). Further proteins encoded by polynucleotides which hybridize to the complement of the nucleic acid molecules encoding these amino acid sequences under stringent hybridization conditions or alternatively, under lower stringency conditions, are also encompassed by the invention, as are the polynucleotides encoding these proteins.

[0106] By a nucleic acid having a nucleotide sequence at least, for example, 95% “identical” to a reference nucleotide sequence of the present invention, it is intended that the nucleotide sequence of the nucleic acid is identical to the reference sequence except that the nucleotide sequence may include up to five point mutations per each 100 nucleotides of the reference nucleotide sequence encoding the polypeptide. In other words, to obtain a nucleic acid having a nucleotide sequence at least 95% identical to a reference nucleotide sequence, up to 5% of the nucleotides in the reference sequence may be deleted or substituted with another nucleotide, or a number of nucleotides up to 5% of the total nucleotides in the reference sequence may be inserted into the reference sequence. The query sequence may be an entire sequence referred to in Table 1A or 2 as the ORF (open reading frame), or any fragment specified, as described herein.

[0107] As a practical matter, whether any particular nucleic acid molecule or polypeptide is at least 80%, 85%, 90%, 95%, 96%, 97%, 98% or 99% identical to a nucleotide sequence of the present invention can be determined conventionally using known computer programs. A preferred method for determining the best overall match between a query sequence (a sequence of the present invention) and a subject sequence, also referred to as a global sequence alignment, can be determined using the FASTDB computer program based on the algorithm of Brutlag et al. (Comp. App. Biosci. 6:237-245 (1990)). In a sequence alignment the query and subject sequences are both DNA sequences. An RNA sequence can be compared by converting U's to T's. The result of said global sequence alignment is expressed as percent identity. Preferred parameters used in a FASTDB alignment of DNA sequences to calculate percent identity are: Matrix=Unitary, k-tuple=4, Mismatch Penalty=1, Joining Penalty=30, Randomization Group Length=0, Cutoff Score=1, Gap Penalty=5, Gap Size Penalty 0.05, Window Size=500 or the length of the subject nucleotide sequence, whichever is shorter.

[0108] If the subject sequence is shorter than the query sequence because of 5′ or 3′ deletions, not because of internal deletions, a manual correction must be made to the results. This is because the FASTDB program does not account for 5′ and 3′ truncations of the subject sequence when calculating percent identity. For subject sequences truncated at the 5′ or 3′ ends, relative to the query sequence, the percent identity is corrected by calculating the number of bases of the query sequence that are 5′ and 3′ of the subject sequence, which are not matched/aligned, as a percent of the total bases of the query sequence. Whether a nucleotide is matched/aligned is determined by results of the FASTDB sequence alignment. This percentage is then subtracted from the percent identity, calculated by the above FASTDB program using the specified parameters, to arrive at a final percent identity score. This corrected score is what is used for the purposes of the present invention. Only bases outside the 5′ and 3′ bases of the subject sequence, as displayed by the FASTDB alignment, which are not matched/aligned with the query sequence, are calculated for the purposes of manually adjusting the percent identity score.

[0109] For example, a 90 base subject sequence is aligned to a 100 base query sequence to determine percent identity. The deletions occur at the 5′ end of the subject sequence and therefore, the FASTDB alignment does not show a matched/alignment of the first 10 bases at 5′ end. The 10 unpaired bases represent 10% of the sequence (number of bases at the 5′ and 3′ ends not matched/total number of bases in the query sequence) so 10% is subtracted from the percent identity score calculated by the FASTDB program. If the remaining 90 bases were perfectly matched the final percent identity would be 90%. In another example, a 90 base subject sequence is compared with a 100 base query sequence. This time the deletions are internal deletions so that there are no bases on the 5′ or 3′ of the subject sequence which are not matched/aligned with the query. In this case the percent identity calculated by FASTDB is not manually corrected. Once again, only bases 5′ and 3′ of the subject sequence which are not matched/aligned with the query sequence are manually corrected for. No other manual corrections are to be made for the purposes of the present invention.

[0110] By a polypeptide having an amino acid sequence at least, for example, 95% “identical” to a query amino acid sequence of the present invention, it is intended that the amino acid sequence of the subject polypeptide is identical to the query sequence except that the subject polypeptide sequence may include up to five amino acid alterations per each 100 amino acids of the query amino acid sequence. In other words, to obtain a polypeptide having an amino acid sequence at least 95% identical to a query amino acid sequence, up to 5% of the amino acid residues in the subject sequence may be inserted, deleted, (indels) or substituted with another amino acid. These alterations of the reference sequence may occur at the amino or carboxy terminal positions of the reference amino acid sequence or anywhere between those terminal positions, interspersed either individually among residues in the reference sequence or in one or more contiguous groups within the reference sequence.

[0111] As a practical matter, whether any particular polypeptide is at least 80%, 85%, 90%, 95%, 96%, 97%, 98% or 99% identical to, for instance, the amino acid sequence of a polypeptide referred to in Table 1A (e.g., an amino acid sequence identified in columns 5 or 6) or Table 2 (e.g., the amino acid sequence of the polypeptide encoded by the polynucleotide sequence defined in columns 8 and 9 of Table 2) or a fragment thereof, the amino acid sequence of the polypeptide encoded by the polynucleotide sequence in SEQ ID NO:B as defined in column 6 of Table 1B or a fragment thereof, the amino acid sequence of the polypeptide encoded by the nucleotide sequence in SEQ ID NO:X or a fragment thereof, or an amino acid sequence of the polypeptide encoded by cDNA contained in Clone ID NO:Z, or a fragment thereof, can be determined conventionally using known computer programs. A preferred method for determining the best overall match between a query sequence (a sequence of the present invention) and a subject sequence, also referred to as a global sequence alignment, can be determined using the FASTDB computer program based on the algorithm of Brutlag et al. (Comp. App. Biosci.6:237-245 (1990)). In a sequence alignment the query and subject sequences are either both nucleotide sequences or both amino acid sequences. The result of said global sequence alignment is expressed as percent identity. Preferred parameters used in a FASTDB amino acid alignment are: Matrix=PAM 0, k-tuple=2, Mismatch Penalty=1, Joining Penalty=20, Randomization Group Length=0, Cutoff Score=1, Window Size=sequence length, Gap Penalty=5, Gap Size Penalty=0.05, Window Size=500 or the length of the subject amino acid sequence, whichever is shorter.

[0112] If the subject sequence is shorter than the query sequence due to N- or C-terminal deletions, not because of internal deletions, a manual correction must be made to the results. This is because the FASTDB program does not account for N- and C-terminal truncations of the subject sequence when calculating global percent identity. For subject sequences truncated at the N- and C-termini, relative to the query sequence, the percent identity is corrected by calculating the number of residues of the query sequence that are N- and C-terminal of the subject sequence, which are not matched/aligned with a corresponding subject residue, as a percent of the total bases of the query sequence. Whether a residue is matched/aligned is determined by results of the FASTDB sequence alignment. This percentage is then subtracted from the percent identity, calculated by the above FASTDB program using the specified parameters, to arrive at a final percent identity score. This final percent identity score is what is used for the purposes of the present invention. Only residues to the N- and C-termini of the subject sequence, which are not matched/aligned with the query sequence, are considered for the purposes of manually adjusting the percent identity score. That is, only query residue positions outside the farthest N- and C-terminal residues of the subject sequence.

[0113] For example, a 90 amino acid residue subject sequence is aligned with a 100 residue query sequence to determine percent identity. The deletion occurs at the N-terminus of the subject sequence and therefore, the FASTDB alignment does not show a matching/alignment of the first 10 residues at the N-terminus. The 10 unpaired residues represent 10% of the sequence (number of residues at the N- and C-termini not matched/total number of residues in the query sequence) so 10% is subtracted from the percent identity score calculated by the FASTDB program. If the remaining 90 residues were perfectly matched the final percent identity would be 90%. In another example, a 90 residue subject sequence is compared with a 100 residue query sequence. This time the deletions are internal deletions so there are no residues at the N- or C-termini of the subject sequence which are not matched/aligned with the query. In this case the percent identity calculated by FASTDB is not manually corrected. Once again, only residue positions outside the N- and C-terminal ends of the subject sequence, as displayed in the FASTDB alignment, which are not matched/aligned with the query sequence are manually corrected for. No other manual corrections are to be made for the purposes of the present invention.

[0114] The polynucleotide variants of the invention may contain alterations in the coding regions, non-coding regions, or both. Especially preferred are polynucleotide variants containing alterations, which produce silent substitutions, additions, or deletions, but do not alter the properties or activities of the encoded polypeptide. Nucleotide variants produced by silent substitutions due to the degeneracy of the genetic code are preferred. Moreover, polypeptide variants in which less than 50, less than 40, less than 30, less than 20, less than 10, or 5-50, 5-25, 5-10, 1-5, or 1-2 amino acids are substituted, deleted, or added in any combination are also preferred. Polynucleotide variants can be produced for a variety of reasons, e.g., to optimize codon expression for a particular host (change codons in the human mRNA to those preferred by a bacterial host such as E. coli).

[0115] Naturally occurring variants are called “allelic variants,” and refer to one of several alternate forms of a gene occupying a given locus on a chromosome of an organism. (Genes II, Lewin, B., ed., John Wiley & Sons, New York (1985).) These allelic variants can vary at either the polynucleotide and/or polypeptide level and are included in the present invention. Alternatively, non-naturally occurring variants may be produced by mutagenesis techniques or by direct synthesis.

[0116] Using known methods of protein engineering and recombinant DNA technology, variants may be generated to improve or alter the characteristics of the polypeptides of the present invention. For instance, one or more amino acids can be deleted from the N-terminus or C-terminus of the polypeptides of the present invention without substantial loss of biological function. As an example, the authors of Ron et al., J. Biol. Chem. 268: 2984-2988 (1993), reported variant KGF proteins having heparin binding activity even after deleting 3, 8, or 27 amino-terminal amino acid residues. Similarly, Interferon gamma exhibited up to ten times higher activity after deleting 8-10 amino acid residues from the carboxy terminus of this protein. (Dobeli et al., J. Biotechnology 7:199-216 (1988).)

[0117] Moreover, ample evidence demonstrates that variants often retain a biological activity similar to that of the naturally occurring protein. For example, Gayle and coworkers (J. Biol. Chem. 268:22105-22111 (1993)) conducted extensive mutational analysis of human cytokine IL-1a. They used random mutagenesis to generate over 3,500 individual IL-1a mutants that averaged 2.5 amino acid changes per variant over the entire length of the molecule. Multiple mutations were examined at every possible amino acid position. The investigators found that “[m]ost of the molecule could be altered with little effect on either [binding or biological activity].” In fact, only 23 unique amino acid sequences, out of more than 3,500 nucleotide sequences examined, produced a protein that significantly differed in activity from wild-type.

[0118] Furthermore, even if deleting one or more amino acids from the N-terminus or C-terminus of a polypeptide results in modification or loss of one or more biological functions, other biological activities may still be retained. For example, the ability of a deletion variant to induce and/or to bind antibodies which recognize the secreted form will likely be retained when less than the majority of the residues of the secreted form are removed from the N-terminus or C-terminus. Whether a particular polypeptide lacking N- or C-terminal residues of a protein retains such immunogenic activities can readily be determined by routine methods described herein and otherwise known in the art.

[0119] Thus, the invention further includes polypeptide variants which show a functional activity (e.g., biological activity) of the polypeptides of the invention. Such variants include deletions, insertions, inversions, repeats, and substitutions selected according to general rules known in the art so as have little effect on activity.

[0120] The present application is directed to nucleic acid molecules at least 80%, 85%, 90%, 95%, 96%, 97%, 98%, 99% or 100% identical to the nucleic acid sequences disclosed herein, (e.g., encoding a polypeptide having the amino acid sequence of an N and/or C terminal deletion), irrespective of whether they encode a polypeptide having functional activity. This is because even where a particular nucleic acid molecule does not encode a polypeptide having functional activity, one of skill in the art would still know how to use the nucleic acid molecule, for instance, as a hybridization probe or a polymerase chain reaction (PCR) primer. Uses of the nucleic acid molecules of the present invention that do not encode a polypeptide having functional activity include, inter alia, (1) isolating a gene or allelic or splice variants thereof in a cDNA library; (2) in situ hybridization (e.g., “FISH”) to metaphase chromosomal spreads to provide precise chromosomal location of the gene, as described in Verma et al., Human Chromosomes: A Manual of Basic Techniques, Pergamon Press, New York (1988); (3) Northern Blot analysis for detecting mRNA expression in specific tissues (e.g., normal colon or diseased colon tissues); and (4) in situ hybridization (e.g., histochemistry) for detecting mRNA expression in specific tissues (e.g., normal colon or diseased colon tissues).

[0121] Preferred, however, are nucleic acid molecules having sequences at least 80%, 85%, 90%, 95%, 96%, 97%, 98%, 99% or 100% identical to the nucleic acid sequences disclosed herein, which do, in fact, encode a polypeptide having functional activity. By a polypeptide having “functional activity” is meant, a polypeptide capable of displaying one or more known functional activities associated with a full-length (complete) protein of the invention. Such functional activities include, but are not limited to, biological activity, antigenicity [ability to bind (or compete with a polypeptide of the invention for binding) to an anti-polypeptide of the invention antibody], immunogenicity (ability to generate antibody which binds to a specific polypeptide of the invention), ability to form multimers with polypeptides of the invention, and ability to bind to a receptor or ligand for a polypeptide of the invention.

[0122] The functional activity of the polypeptides, and fragments, variants and derivatives of the invention, can be assayed by various methods.

[0123] For example, in one embodiment where one is assaying for the ability to bind or compete with full-length polypeptide of the present invention for binding to an anti-polypeptide of the invention antibody, various immunoassays known in the art can be used, including but not limited to, competitive and non-competitive assay systems using techniques such as radioimmunoassays, ELISA (enzyme linked immunosorbent assay), “sandwich” immunoassays, immunoradiometric assays, gel diffusion precipitation reactions, immunodiffusion assays, in situ immunoassays (using colloidal gold, enzyme or radioisotope labels, for example), western blots, precipitation reactions, agglutination assays (e.g., gel agglutination assays, hemagglutination assays), complement fixation assays, immunofluorescence assays, protein A assays, and immunoelectrophoresis assays, etc. In one embodiment, antibody binding is detected by detecting a label on the primary antibody. In another embodiment, the primary antibody is detected by detecting binding of a secondary antibody or reagent to the primary antibody. In a further embodiment, the secondary antibody is labeled. Many means are known in the art for detecting binding in an immunoassay and are within the scope of the present invention.

[0124] In another embodiment, where a ligand is identified, or the ability of a polypeptide fragment, variant or derivative of the invention to multimerize is being evaluated, binding can be assayed, e.g., by means well-known in the art, such as, for example, reducing and non-reducing gel chromatography, protein affinity chromatography, and affinity blotting. See generally, Phizicky et al., Microbiol. Rev. 59:94-123 (1995). In another embodiment, the ability of physiological correlates of a polypeptide of the present invention to bind to a substrate(s) of the polypeptide of the invention can be routinely assayed using techniques known in the art.

[0125] In addition, assays described herein (see Examples) and otherwise known in the art may routinely be applied to measure the ability of polypeptides of the present invention and fragments, variants and derivatives thereof to elicit polypeptide related biological activity (either in vitro or in vivo). Other methods will be known to the skilled artisan and are within the scope of the invention.

[0126] Of course, due to the degeneracy of the genetic code, one of ordinary skill in the art will immediately recognize that a large number of the nucleic acid molecules having a sequence at least 80%, 85%, 90%, 95%, 96%, 97%, 98%, 99%, or 100% identical to, for example, the nucleic acid sequence of the cDNA contained in Clone ID NO:Z, a nucleic acid sequence referred to in Table 1A (e.g., SEQ ID NO:X), a nucleic acid sequence disclosed in Table 2 (e.g., the nucleic acid sequence delineated in columns 8 and 9) or fragments thereof, will encode polypeptides “having functional activity.” In fact, since degenerate variants of any of these nucleotide sequences all encode the same polypeptide, in many instances, this will be clear to the skilled artisan even without performing the above described comparison assay. It will be further recognized in the art that, for such nucleic acid molecules that are not degenerate variants, a reasonable number will also encode a polypeptide having functional activity. This is because the skilled artisan is fully aware of amino acid substitutions that are either less likely or not likely to significantly effect protein function (e.g., replacing one aliphatic amino acid with a second aliphatic amino acid), as further described below.

[0127] For example, guidance concerning how to make phenotypically silent amino acid substitutions is provided in Bowie et al., “Deciphering the Message in Protein Sequences: Tolerance to Amino Acid Substitutions,” Science 247:1306-1310 (1990), wherein the authors indicate that there are two main strategies for studying the tolerance of an amino acid sequence to change.

[0128] The first strategy exploits the tolerance of amino acid substitutions by natural selection during the process of evolution. By comparing amino acid sequences in different species, conserved amino acids can be identified. These conserved amino acids are likely important for protein function. In contrast, the amino acid positions where substitutions have been tolerated by natural selection indicates that these positions are not critical for protein function. Thus, positions tolerating amino acid substitution could be modified while still maintaining biological activity of the protein.

[0129] The second strategy uses genetic engineering to introduce amino acid changes at specific positions of a cloned gene to identify regions critical for protein function. For example, site directed mutagenesis or alanine-scanning mutagenesis (introduction of single alanine mutations at every residue in the molecule) can be used. See Cunningham et al., Science 244:1081-1085 (1989). The resulting mutant molecules can then be tested for biological activity.

[0130] As the authors state, these two strategies have revealed that proteins are surprisingly tolerant of amino acid substitutions. The authors further indicate which amino acid changes are likely to be permissive at certain amino acid positions in the protein. For example, most buried (within the tertiary structure of the protein) amino acid residues require nonpolar side chains, whereas few features of surface side chains are generally conserved. Moreover, tolerated conservative amino acid substitutions involve replacement of the aliphatic or hydrophobic amino acids Ala, Val, Leu and Ile; replacement of the hydroxyl residues Ser and Thr; replacement of the acidic residues Asp and Glu; replacement of the amide residues Asn and Gln, replacement of the basic residues Lys, Arg, and His; replacement of the aromatic residues Phe, Tyr, and Trp, and replacement of the small-sized amino acids Ala, Ser, Thr, Met, and Gly. Besides conservative amino acid substitutions, variants of the present invention include (i) substitutions with one or more of the non-conserved amino acid residues, where the substituted amino acid residues may or may not be one encoded by the genetic code, or (ii) substitutions with one or more of the amino acid residues having a substituent group, or (iii) fusion of the mature polypeptide with another compound, such as a compound to increase the stability and/or solubility of the polypeptide (for example, polyethylene glycol), or (iv) fusion of the polypeptide with additional amino acids, such as, for example, an IgG Fc fusion region peptide, serum albumin (preferably human serum albumin) or a fragment or variant thereof, or leader or secretory sequence, or a sequence facilitating purification. Such variant polypeptides are deemed to be within the scope of those skilled in the art from the teachings herein.

[0131] For example, polypeptide variants containing amino acid substitutions of charged amino acids with other charged or neutral amino acids may produce proteins with improved characteristics, such as less aggregation. Aggregation of pharmaceutical formulations both reduces activity and increases clearance due to the aggregate's immunogenic activity. See Pinckard et al., Clin. Exp. Immunol. 2:331-340 (1967); Robbins et al., Diabetes 36: 838-845 (1987); Cleland et al., Crit. Rev. Therapeutic Drug Carrier Systems 10:307-377 (1993).

[0132] A further embodiment of the invention relates to polypeptides which comprise the amino acid sequence of a polypeptide having an amino acid sequence which contains at least one amino acid substitution, but not more than 50 amino acid substitutions, even more preferably, not more than 40 amino acid substitutions, still more preferably, not more than 30 amino acid substitutions, and still even more preferably, not more than 20 amino acid substitutions from a polypeptide sequence disclosed herein. Of course it is highly preferable for a polypeptide to have an amino acid sequence which comprises the amino acid sequence of a polypeptide of SEQ ID NO:Y, an amino acid sequence encoded by SEQ ID NO:X, an amino acid sequence encoded by the portion of SEQ ID NO:X as defined in columns 8 and 9 of Table 2, an amino acid sequence encoded by the complement of SEQ ID NO:X, and/or the amino acid sequence encoded by cDNA contained in Clone ID NO:Z which contains, in order of ever-increasing preference, at least one, but not more than 10, 9, 8, 7, 6, 5, 4, 3, 2 or 1 amino acid substitutions.

[0133] In specific embodiments, the polypeptides of the invention comprise, or alternatively, consist of, fragments or variants of a reference amino acid sequence selected from: (a) the amino acid sequence of SEQ ID NO:Y or fragments thereof (e.g., the mature form and/or other fragments described herein); (b) the amino acid sequence encoded by SEQ ID NO:X or fragments thereof; (c) the amino acid sequence encoded by the complement of SEQ ID NO:X or fragments thereof; (d) the amino acid sequence encoded by the portion of SEQ ID NO:X as defined in columns 8 and 9 of Table 2 or fragments thereof; and (e) the amino acid sequence encoded by cDNA contained in Clone ID NO:Z or fragments thereof; wherein the fragments or variants have 1-5, 5-10, 5-25, 5-50, 10-50 or 50-150, amino acid residue additions, substitutions, and/or deletions when compared to the reference amino acid sequence. In preferred embodiments, the amino acid substitutions are conservative. Polynucleotides encoding these polypeptides are also encompassed by the invention.

[0134] Polynucleotide and Polypeptide Fragments

[0135] The present invention is also directed to polynucleotide fragments of the polynucleotides (nucleic acids) of the invention. In the present invention, a “polynucleotide fragment” refers to a polynucleotide having a nucleic acid sequence which, for example: is a portion of the cDNA contained in Clone ID NO:Z or the complementary strand thereto; is a portion of the polynucleotide sequence encoding the polypeptide encoded by the cDNA contained in Clone ID NO:Z or the complementary strand thereto; is a portion of a polynucleotide sequence encoding the amino acid sequence encoded by the region of SEQ ID NO:X as defined in columns 8 and 9 of Table 2 or the complementary strand thereto; is a portion of the polynucleotide sequence of SEQ ID NO:X as defined in columns 8 and 9 of Table 2 or the complementary strand thereto; is a portion of the polynucleotide sequence in SEQ ID NO:X or the complementary strand thereto; is a polynucleotide sequence encoding a portion of the polypeptide of SEQ ID NO:Y; is a polynucleotide sequence encoding a portion of a polypeptide encoded by SEQ ID NO:X; is a polynucleotide sequence encoding a portion of a polypeptide encoded by the complement of the polynucleotide sequence in SEQ ID NO:X; is a portion of a polynucleotide sequence encoding the amino acid sequence encoded by the region of SEQ ID NO:B as defined in column 6 of Table 1B or the complementary strand thereto; or is a portion of the polynucleotide sequence of SEQ ID NO:B as defined in column 6 of Table 1B or the complementary strand thereto.

[0136] The polynucleotide fragments of the invention are preferably at least about 15 nt, and more preferably at least about 20 nt, still more preferably at least about 30 nt, and even more preferably, at least about 40 nt, at least about 50 nt, at least about 75 nt, or at least about 150 nt in length. A fragment “at least 20 nt in length,” for example, is intended to include 20 or more contiguous bases from the cDNA sequence contained in Clone ID NO:Z, or the nucleotide sequence shown in SEQ ID NO:X or the complementary stand thereto. In this context “about” includes the particularly recited value or a value larger or smaller by several (5, 4, 3, 2, or 1) nucleotides, at either terminus or at both termini. These nucleotide fragments have uses that include, but are not limited to, as diagnostic probes and primers as discussed herein. Of course, larger fragments (e.g., at least 160, 170, 180, 190, 200, 250, 500, 600, 1000, or 2000 nucleotides in length) are also encompassed by the invention.

[0137] Moreover, representative examples of polynucleotide fragments of the invention, comprise, or alternatively consist of, a sequence from about nucleotide number 1-50, 51-100, 101-150, 151-200, 201-250, 251-300, 301-350, 351-400, 401-450, 451-500, 501-550, 551-600, 651-700, 701-750, 751-800, 800-850, 851-900, 901-950, 951-1000, 1001-1050, 1051-1100, 1101-1150, 1151-1200, 1201-1250, 1251-1300, 1301-1350, 1351-1400, 1401-1450, 1451-1500, 1501-1550, 1551-1600, 1601-1650, 1651-1700, 1701-1750, 1751-1800, 1801-1850, 1851-1900, 1901-1950, 1951-2000, 2001-2050, 2051-2100, 2101-2150, 2151-2200, 2201-2250, 2251-2300, 2301-2350, 2351-2400, 2401-2450, 2451-2500, 2501-2550, 2551-2600, 2601-2650, 2651-2700, 2701-2750, 2751-2800, 2801-2850, 2851-2900, 2901-2950, 2951-3000, 3001-3050, 3051-3100, 3101-3150, 3151-3200, 3201-3250, 3251-3300, 3301-3350, 3351-3400, 3401-3450, 3451-3500, 3501-3550, 3551-3600, 3601-3650, 3651-3700, 3701-3750, 3751-3800, 3801-3850, 3851-3900, 3901-3950, 3951-4000, 4001-4050, 4051-4100, 4101-4150, 4151-4200, 4201-4250, 4251-4300, 4301-4350, 4351-4400, 4401-4450, 4451-4500, 4501-4550, 4551-4600, 4601-4650, 4651-4700, 4701-4750, 4751-4800, 4801-4850, 4851-4900, 4901-4950, 4951-5000, 5001-5050, 5051-5100, 5101-5150, 5151-5200, 5201-5250, 5251-5300, 5301-5350, 5351-5400, 5401-5450, 5451-5500, 5501-5550, 5551-5600, 5601-5650, 5651-5700, 5701-5750, 5751-5800, 5801-5850, 5851-5900, 5901-5950, 5951-6000, 6001-6050, 6051-6100, 6101-6150, 6151-6200, 6201-6250, 6251-6300, 6301-6350, 6351-6400, 6401-6450, 6451-6500, 6501-6550, 6551-6600, 6601-6650, 6651-6700, 6701-6750, 6751-6800, 6801-6850, 6851-6900, 6901-6950, 6951-7000, 7001-7050, 7051-7100, 7101-7150, 7151-7200, 7201-7250, 7251-7300 or 7301 to the end of SEQ ID NO:X, or the complementary strand thereto. In this context “about” includes the particularly recited range or a range larger or smaller by several (5, 4, 3, 2, or 1) nucleotides, at either terminus or at both termini. Preferably, these fragments encode a polypeptide, which has a functional activity (e.g., biological activity). More preferably, these polynucleotides can be used as probes or primers as discussed herein. Polynucleotides which hybridize to one or more of these polynucleotides under stringent hybridization conditions or alternatively, under lower stringency conditions are also encompassed by the invention, as are polypeptides encoded by these polynucleotides.

[0138] Further representative examples of polynucleotide fragments of the invention, comprise, or alternatively consist of, a sequence from about nucleotide number 1-50, 51-100, 101-150, 151-200, 201-250, 251-300, 301-350, 351-400, 401-450, 451-500, 501-550, 551-600, 651-700, 701-750, 751-800, 800-850, 851-900, 901-950, 951-1000, 1001-1050, 1051-1100, 1101-1150, 1151-1200, 1201-1250, 1251-1300, 1301-1350, 1351-1400, 1401-1450, 1451-1500, 1501-1550, 1551-1600, 1601-1650, 1651-1700, 1701-1750, 1751-1800, 1801-1850, 1851-1900, 1901-1950, 1951-2000, 2001-2050, 2051-2100, 2101-2150, 2151-2200, 2201-2250, 2251-2300, 2301-2350, 2351-2400, 2401-2450, 2451-2500, 2501-2550, 2551-2600, 2601-2650, 2651-2700, 2701-2750, 2751-2800, 2801-2850, 2851-2900, 2901-2950, 2951-3000, 3001-3050, 3051-3100, 3101-3150, 3151-3200, 3201-3250, 3251-3300, 3301-3350, 3351-3400, 3401-3450, 3451-3500, 3501-3550, 3551-3600, 3601-3650, 3651-3700, 3701-3750, 3751-3800, 3801-3850, 3851-3900, 3901-3950, 3951-4000, 4001-4050, 4051-4100, 4101-4150, 4151-4200, 4201-4250, 4251-4300, 4301-4350, 4351-4400, 4401-4450, 4451-4500, 4501-4550, 4551-4600, 4601-4650, 4651-4700, 4701-4750, 4751-4800, 4801-4850, 4851-4900, 4901-4950, 4951-5000, 5001-5050, 5051-5100, 5101-5150, 5151-5200, 5201-5250, 5251-5300, 5301-5350, 5351-5400, 5401-5450, 5451-5500, 5501-5550, 5551-5600, 5601-5650, 5651-5700, 5701-5750, 5751-5800, 5801-5850, 5851-5900, 5901-5950, 5951-6000, 6001-6050, 6051-6100, 6101-6150, 6151-6200, 6201-6250, 6251-6300, 6301-6350, 6351-6400, 6401-6450, 6451-6500, 6501-6550, 6551-6600, 6601-6650, 6651-6700, 6701-6750, 6751-6800, 6801-6850, 6851-6900, 6901-6950, 6951-7000, 7001-7050, 7051-7100, 7101-7150, 7151-7200, 7201-7250, 7251-7300 or 7301 to the end of the cDNA sequence contained in Clone ID NO:Z, or the complementary strand thereto. In this context “about” includes the particularly recited range or a range larger or smaller by several (5, 4, 3, 2, or 1) nucleotides, at either terminus or at both termini. Preferably, these fragments encode a polypeptide, which has a functional activity (e.g., biological activity). More preferably, these polynucleotides can be used as probes or primers as discussed herein. Polynucleotides which hybridize to one or more of these polynucleotides under stringent hybridization conditions or alternatively, under lower stringency conditions are also encompassed by the invention, as are polypeptides encoded by these polynucleotides.

[0139] Moreover, representative examples of polynucleotide fragments of the invention comprise, or alternatively consist of, a nucleic acid sequence comprising one, two, three, four, five, six, seven, eight, nine, ten, or more of the above described polynucleotide fragments of the invention in combination with a polynucleotide sequence delineated in Table 1B column 6. Additional, representative examples of polynucleotide fragments of the invention comprise, or alternatively consist of, a nucleic acid sequence comprising one, two, three, four, five, six, seven, eight, nine, ten, or more of the above described polynucleotide fragments of the invention in combination with a polynucleotide sequence that is the complementary strand of a sequence delineated in column 6 of Table 1B. In further embodiments, the above-described polynucleotide fragments of the invention comprise, or alternatively consist of, sequences delineated in Table 1B, column 6, and have a nucleic acid sequence which is different from that of the BAC fragment having the sequence disclosed in SEQ ID NO:B (see Table 1B, column 5). In additional embodiments, the above-described polynucleotide fragments of the invention comprise, or alternatively consist of, sequences delineated in Table 1B, column 6, and have a nucleic acid sequence which is different from that published for the BAC clone identified as BAC ID NO:A (see Table 1B, column 4). In additional embodiments, the above-described polynucleotides of the invention comprise, or alternatively consist of, sequences delineated Table 1B, column 6, and have a nucleic acid sequence which is different from that contained in the BAC clone identified as BAC ID NO:A (see Table 1B, column 4). Polypeptides encoded by these polynucleotides, other polynucleotides that encode these polypeptides, and antibodies that bind these polypeptides are also encompassed by the invention. Additionally, fragments and variants of the above-described polynucleotides and polypeptides are also encompassed by the invention.

[0140] In additional specific embodiments, polynucleotides of the invention comprise, or alternatively consist of, one, two, three, four, five, six, seven, eight, nine, ten, or more fragments of the sequences delineated in column 6 of Table 1B, and the polynucleotide sequence of SEQ ID NO:X (e.g., as defined in Table 1B, column 2) or fragments or variants thereof. Polypeptides encoded by these polynucleotides, other polynucleotides that encode these polypeptides, and antibodies that bind these polypeptides are also encompassed by the invention.

[0141] In additional specific embodiments, polynucleotides of the invention comprise, or alternatively consist of, one, two, three, four, five, six, seven, eight, nine, ten, or more fragments of the sequences delineated in column 6 of Table 1B which correspond to the same Clone ID NO:Z (see Table 1B, column 1), and the polynucleotide sequence of SEQ ID NO:X (e.g., as defined in Table 1A or 1B) or fragments or variants thereof. Polypeptides encoded by these polynucleotides, other polynucleotides that encode these polypeptides, and antibodies that bind these polypeptides are also encompassed by the invention.

[0142] In further specific embodiments, polynucleotides of the invention comprise, or alternatively consist of, one, two, three, four, five, six, seven, eight, nine, ten, or more fragments of the sequences delineated in the same row of column 6 of Table 1B, and the polynucleotide sequence of SEQ ID NO:X (e.g., as defined in Table 1A or 1B) or fragments or variants thereof. Polypeptides encoded by these polynucleotides, other polynucleotides that encode these polypeptides, and antibodies that bind these polypeptides are also encompassed by the invention.

[0143] In additional specific embodiments, polynucleotides of the invention comprise, or alternatively consist of a polynucleotide sequence in which the 3′ 10 polynucleotides of one of the sequences delineated in column 6 of Table 1 B and the 5′ 10 polynucleotides of the sequence of SEQ ID NO:X are directly contiguous. Nucleic acids which hybridize to the complement of these 20 contiguous polynucleotides under stringent hybridization conditions or alternatively, under lower stringency conditions, are also encompassed by the invention. Polypeptides encoded by these polynucleotides and/or nucleic acids, other polynucleotides and/or nucleic acids that encode these polypeptides, and antibodies that bind these polypeptides are also encompassed by the invention. Additionally, fragments and variants of the above-described polynucleotides, nucleic acids, and polypeptides are also encompassed by the invention.

[0144] In additional specific embodiments, polynucleotides of the invention comprise, or alternatively consist of a polynucleotide sequence in which the 3′ 10 polynucleotides of one of the sequences delineated in column 6 of Table 1B and the 5′ 10 polynucleotides of a fragment or variant of the sequence of SEQ ID NO:X (e.g., as described herein) are directly contiguous Nucleic acids which hybridize to the complement of these 20 contiguous polynucleotides under stringent hybridization conditions or alternatively, under lower stringency conditions, are also encompassed by the invention. Polypeptides encoded by these polynucleotides and/or nucleic acids, other polynucleotides and/or nucleic acids encoding these polypeptides, and antibodies that bind these polypeptides are also encompassed by the invention. Additionally, fragments and variants of the above-described polynucleotides, nucleic acids, and polypeptides are also encompassed by the invention.

[0145] In further specific embodiments, polynucleotides of the invention comprise, or alternatively consist of a polynucleotide sequence in which the 3′ 10 polynucleotides of a fragment or variant of the sequence of SEQ ID NO:X and the 5′ 10 polynucleotides of the sequence of one of the sequences delineated in column 6 of Table 1B are directly contiguous. Nucleic acids which hybridize to the complement of these 20 contiguous polynucleotides under stringent hybridization conditions or alternatively, under lower stringency conditions, are also encompassed by the invention. Polypeptides encoded by these polynucleotides and/or nucleic acids, other polynucleotides and/or nucleic acids encoding these polypeptides, and antibodies that bind these polypeptides are also encompassed by the invention. Additionally, fragments and variants of the above-described polynucleotides, nucleic acids, and polypeptides are also encompassed by the invention.

[0146] In specific embodiments, polynucleotides of the invention comprise, or alternatively consist of a polynucleotide sequence in which the 3′ 10 polynucleotides of one of the sequences delineated in column 6 of Table 1B and the 5′ 10 polynucleotides of another sequence in column 6 are directly contiguous. In preferred embodiments, the 3′ 10 polynucleotides of one of the sequences delineated in column 6 of Table 1B is directly contiguous with the 5′ 10 polynucleotides of the next sequential exon delineated in Table 1B, column 6. Nucleic acids which hybridize to the complement of these 20 contiguous polynucleotides under stringent hybridization conditions or alternatively, under lower stringency conditions, are also encompassed by the invention. Polypeptides encoded by these polynucleotides and/or nucleic acids, other polynucleotides and/or nucleic acids encoding these polypeptides, and antibodies that bind these polypeptides are also encompassed by the invention. Additionally, fragments and variants of the above-described polynucleotides, nucleic acids, and polypeptides are also encompassed by the invention.

[0147] In the present invention, a “polypeptide fragment” refers to an amino acid sequence which is a portion of that contained in SEQ ID NO:Y, a portion of an amino acid sequence encoded by the portion of SEQ ID NO:X as defined in columns 8 and 9 of Table 2, a portion of an amino acid sequence encoded by the polynucleotide sequence of SEQ ID NO:X, a portion of an amino acid sequence encoded by the complement of the polynucleotide sequence in SEQ ID NO:X, and/or a portion of an amino acid sequence encoded by the cDNA contained in Clone ID NO:Z. Protein (polypeptide) fragments may be “free-standing,” or comprised within a larger polypeptide of which the fragment forms a part or region, most preferably as a single continuous region. Representative examples of polypeptide fragments of the invention, include, for example, fragments comprising, or alternatively consisting of, from about amino acid number 1-20, 21-40, 41-60, 61-80, 81-100, 102-120, 121-140, 141-160, 161-180, 181-200, 201-220, 221-240, 241-260, 261-280, 281-300, 301-320, 321-340, 341-360, 361-380, 381-400, 401 420, 421-440, 441-460, 461-480, 481-500, 501-520, 521-540, 541-560, 561-580, 581-600, 601-620, 621-640, 641-660, 661-680, 681-700, 701-720, 721-740, 741-760, 761-780, 781-800, 801-820, 821-840, 841-860, 861-880, 881-900, 901-920, 921-940, 941-960, 961-980, 981-1000, 1001-1020, 1021-1040, 1041-1060, 1061-1080, 1081-1100, 1101-1120, 1121-1140, 1141-1160, 1161-1180, 1181-1200, 1201-1220, 1221-1240, 1241-1260, 1261-1280, 1281-1300, 1301-1320, 1321-1340, 1341-1360, 1361-1380, 1381-1400, 1401-1420, 1421-1440, or 1441 to the end of the coding region. In a preferred embodiment, polypeptide fragments of the invention include, for example, fragments comprising, or alternatively consisting of, from about amino acid number 1-20, 21-40, 41-60, 61-80, 81-100, 102-120, 121-140, 141-160, 161-180, 181-200, 201-220, 221-240, 241-260, 261-280, 281-300, 301-320, 321-340, 341-360, 361-380, 381-400, 401-420, 421-440, 441-460, 461-480, 481-500, 501-520, 521-540, 541-560, 561-580, 581-600, 601-620, 621-640, 641-660, 661-680, 681-700, 701-720, 721-740, 741-760, 761-780, 781-800, 801-820, 821-840, 841-860, 861-880, 881-900, 901-920, 921-940, 941-960, 961-980, 981-1000, 1001-1020, 1021-1040, 1041-1060, 1061-1080, 1081-1100, 1101-1120, 1121-1140, 1141-1160, 1161-1180, 1181-1200, 1201-1220, 1221-1240, 1241-1260, 1261-1280, 1281-1300, 1301-1320, 1321-1340, 1341-1360, 1361-1380, 1381-1400, 1401-1420, 1421-1440, or 1441 to the end of the coding region of SEQ ID NO:Y. Moreover, polypeptide fragments of the invention may be at least about 10, 15, 20, 25, 30, 35, 40, 45, 50, 55, 60, 65, 70, 75, 80, 85, 90, 100, 110, 120, 130, 140, or 150 amino acids in length. In this context “about” includes the particularly recited ranges or values, or ranges or values larger or smaller by several (5, 4, 3, 2, or 1) amino acids, at either extreme or at both extremes. Polynucleotides encoding these polypeptide fragments are also encompassed by the invention.

[0148] Even if deletion of one or more amino acids from the N-terminus of a protein results in modification of loss of one or more biological functions of the protein, other functional activities (e.g., biological activities, ability to multimerize, ability to bind a ligand) may still be retained. For example, the ability of shortened muteins to induce and/or bind to antibodies which recognize the complete or mature forms of the polypeptides generally will be retained when less than the majority of the residues of the complete or mature polypeptide are removed from the N-terminus. Whether a particular polypeptide lacking N-terminal residues of a complete polypeptide retains such immunologic activities can readily be determined by routine methods described herein and otherwise known in the art. It is not unlikely that a mutein with a large number of deleted N-terminal amino acid residues may retain some biological or immunogenic activities. In fact, peptides composed of as few as six amino acid residues may often evoke an immune response.

[0149] Accordingly, polypeptide fragments include the secreted protein as well as the mature form. Further preferred polypeptide fragments include the secreted protein or the mature form having a continuous series of deleted residues from the amino or the carboxy terminus, or both. For example, any number of amino acids, ranging from 1-60, can be deleted from the amino terminus of either the secreted polypeptide or the mature form. Similarly, any number of amino acids, ranging from 1-30, can be deleted from the carboxy terminus of the secreted protein or mature form. Furthermore, any combination of the above amino and carboxy terminus deletions is preferred. Similarly, polynucleotides encoding these polypeptide fragments are also preferred.

[0150] The present invention further provides polypeptides having one or more residues deleted from the amino terminus of the amino acid sequence of a polypeptide disclosed herein (e.g., a polypeptide of SEQ ID NO:Y, a polypeptide encoded by the polynucleotide sequence contained in SEQ ID NO:X or the complement thereof, a polypeptide encoded by the portion of SEQ ID NO:X as defined in columns 8 and 9 of Table 2, a polypeptide encoded by the portion of SEQ ID NO:B as defined in column 6 of Table 1B, and/or a polypeptide encoded by the cDNA contained in Clone ID NO:Z). In particular, N-terminal deletions may be described by the general formula m-q, where q is a whole integer representing the total number of amino acid residues in a polypeptide of the invention (e.g., the polypeptide disclosed in SEQ ID NO:Y, or the polypeptide encoded by the portion of SEQ ID NO:X as defined in columns 8 and 9 of Table 2), and m is defined as any integer ranging from 2 to q-6. Polynucleotides encoding these polypeptides are also encompassed by the invention.

[0151] The present invention further provides polypeptides having one or more residues from the carboxy terminus of the amino acid sequence of a polypeptide disclosed herein (e.g., a polypeptide of SEQ ID NO:Y, a polypeptide encoded by the polynucleotide sequence contained in SEQ ID NO:X, a polypeptide encoded by the portion of SEQ ID NO:X as defined in columns 8 and 9 of Table 2, and/or a polypeptide encoded by the cDNA contained in Clone ID NO:Z). In particular, C-terminal deletions may be described by the general formula 1-n, where n is any whole integer ranging from 6 to q-1, and where n corresponds to the position of amino acid residue in a polypeptide of the invention. Polynucleotides encoding these polypeptides are also encompassed by the invention.

[0152] In addition, any of the above described N- or C-terminal deletions can be combined to produce a N- and C-terminal deleted polypeptide. The invention also provides polypeptides having one or more amino acids deleted from both the amino and the carboxyl termini, which may be described generally as having residues m-n of a polypeptide encoded by SEQ ID NO:X (e.g., including, but not limited to, the preferred polypeptide disclosed as SEQ ID NO:Y and the polypeptide encoded by the portion of SEQ ID NO:X as defined in columns 8 and 9 of Table 2), the cDNA contained in Clone ID NO:Z, and/or the complement thereof, where n and m are integers as described above. Polynucleotides encoding these polypeptides are also encompassed by the invention.

[0153] Also as mentioned above, even if deletion of one or more amino acids from the C-terminus of a protein results in modification of loss of one or more biological functions of the protein, other functional activities (e.g., biological activities, ability to multimerize, ability to bind a ligand) may still be retained. For example the ability of the shortened mutein to induce and/or bind to antibodies which recognize the complete or mature forms of the polypeptide generally will be retained when less than the majority of the residues of the complete or mature polypeptide are removed from the C-terminus. Whether a particular polypeptide lacking C-terminal residues of a complete polypeptide retains such immunologic activities can readily be determined by routine methods described herein and otherwise known in the art. It is not unlikely that a mutein with a large number of deleted C-terminal amino acid residues may retain some biological or immunogenic activities. In fact, peptides composed of as few as six amino acid residues may often evoke an immune response.

[0154] The present application is also directed to proteins containing polypeptides at least 80%, 85%, 90%, 95%, 96%, 97%, 98% or 99% identical to a polypeptide sequence set forth herein. In preferred embodiments, the application is directed to proteins containing polypeptides at least 80%, 85%, 90%, 95%, 96%, 97%, 98% or 99% identical to polypeptides having the amino acid sequence of the specific N- and C-terminal deletions. Polynucleotides encoding these polypeptides are also encompassed by the invention.

[0155] Any polypeptide sequence encoded by, for example, the polynucleotide sequences set forth as SEQ ID NO:X or the complement thereof, (presented, for example, in Tables 1A and 2), the cDNA contained in Clone ID NO:Z, or the polynucleotide sequence as defined in column 6 of Table 1B, may be analyzed to determine certain preferred regions of the polypeptide. For example, the amino acid sequence of a polypeptide encoded by a polynucleotide sequence of SEQ ID NO:X (e.g., the polypeptide of SEQ ID NO:Y and the polypeptide encoded by the portion of SEQ ID NO:X as defined in columns 8 and 9 of Table 2) or the CDNA contained in Clone ID NO:Z may be analyzed using the default parameters of the DNASTAR computer algorithm (DNASTAR, Inc., 1228 S. Park St., Madison, Wis. 53715 USA; http://www.dnastar.com/).

[0156] Polypeptide regions that may be routinely obtained using the DNASTAR computer algorithm include, but are not limited to, Garnier-Robson alpha-regions, beta-regions, turn-regions, and coil-regions; Chou-Fasman alpha-regions, beta-regions, and turn-regions; Kyte-Doolittle hydrophilic regions and hydrophobic regions; Eisenberg alpha- and beta-amphipathic regions; Karplus-Schulz flexible regions; Emini surface-forming regions; and Jameson-Wolf regions of high antigenic index. Among highly preferred polynucleotides of the invention in this regard are those that encode polypeptides comprising regions that combine several structural features, such as several (e.g., 1, 2, 3 or 4) of the features set out above.

[0157] Additionally, Kyte-Doolittle hydrophilic regions and hydrophobic regions, Emini surface-forming regions, and Jameson-Wolf regions of high antigenic index (i.e., containing four or more contiguous amino acids having an antigenic index of greater than or equal to 1.5, as identified using the default parameters of the Jameson-Wolf program) can routinely be used to determine polypeptide regions that exhibit a high degree of potential for antigenicity. Regions of high antigenicity are determined from data by DNASTAR analysis by choosing values which represent regions of the polypeptide which are likely to be exposed on the surface of the polypeptide in an environment in which antigen recognition may occur in the process of initiation of an immune response.

[0158] Preferred polypeptide fragments of the invention are fragments comprising, or alternatively, consisting of, an amino acid sequence that displays a functional activity (e.g. biological activity) of the polypeptide sequence of which the amino acid sequence is a fragment. By a polypeptide displaying a “functional activity” is meant a polypeptide capable of one or more known functional activities associated with a full-length protein, such as, for example, biological activity, antigenicity, immunogenicity, and/or multimerization, as described herein.

[0159] Other preferred polypeptide fragments are biologically active fragments. Biologically active fragments are those exhibiting activity similar, but not necessarily identical, to an activity of the polypeptide of the present invention. The biological activity of the fragments may include an improved desired activity, or a decreased undesirable activity.

[0160] In preferred embodiments, polypeptides of the invention comprise, or alternatively consist of, one, two, three, four, five or more of the antigenic fragments of the polypeptide of SEQ ID NO:Y, or portions thereof. Polynucleotides encoding these polypeptides are also encompassed by the invention.

[0161] The present invention encompasses polypeptides comprising, or alternatively consisting of, an epitope of: the polypeptide sequence shown in SEQ ID NO:Y; a polypeptide sequence encoded by SEQ ID NO:X or the complementary strand thereto; the polypeptide sequence encoded by the portion of SEQ ID NO:X as defined in columns 8 and 9 of Table 2; the polypeptide sequence encoded by the portion of SEQ ID NO:B as defined in column 6 of Table 1B or the complement thereto; the polypeptide sequence encoded by the cDNA contained in Clone ID NO:Z; or the polypeptide sequence encoded by a polynucleotide that hybridizes to the sequence of SEQ ID NO:X, the complement of the sequence of SEQ ID NO:X, the complement of a portion of SEQ ID NO:X as defined in columns 8 and 9 of Table 2, or the cDNA sequence contained in Clone ID NO:Z under stringent hybridization conditions or alternatively, under lower stringency hybridization as defined supra. The present invention further encompasses polynucleotide sequences encoding an epitope of a polypeptide sequence of the invention (such as, for example, the sequence disclosed in SEQ ID NO:X, or a fragment thereof), polynucleotide sequences of the complementary strand of a polynucleotide sequence encoding an epitope of the invention, and polynucleotide sequences which hybridize to the complementary strand under stringent hybridization conditions or alternatively, under lower stringency hybridization conditions defined supra.

[0162] The term “epitopes,” as used herein, refers to portions of a polypeptide having antigenic or immunogenic activity in an animal, preferably a mammal, and most preferably in a human. In a preferred embodiment, the present invention encompasses a polypeptide comprising an epitope, as well as the polynucleotide encoding this polypeptide. An “immunogenic epitope,” as used herein, is defined as a portion of a protein that elicits an antibody response in an animal, as determined by any method known in the art, for example, by the methods for generating antibodies described infra. (See, for example, Geysen et al., Proc. Natl. Acad. Sci. USA 81:3998- 4002 (1983)). The term “antigenic epitope,” as used herein, is defined as a portion of a protein to which an antibody can immunospecifically bind its antigen as determined by any method well known in the art, for example, by the immunoassays described herein. Immunospecific binding excludes non-specific binding but does not necessarily exclude cross- reactivity with other antigens. Antigenic epitopes need not necessarily be immunogenic.

[0163] Fragments, which function as epitopes may be produced by any conventional means. (See, e.g., Houghten, R. A., Proc. Natl. Acad. Sci. USA 82:5131-5135 (1985) further described in U.S. Pat. No. 4,631,211.)

[0164] In the present invention, antigenic epitopes preferably contain a sequence of at least 4, at least 5, at least 6, at least 7, more preferably at least 8, at least 9, at least 10, at least 11, at least 12, at least 13, at least 14, at least 15, at least 20, at least 25, at least 30, at least 40, at least 50, and, most preferably, between about 15 to about 30 amino acids. Preferred polypeptides comprising immunogenic or antigenic epitopes are at least 10, 15, 20, 25, 30, 35, 40, 45, 50, 55, 60, 65, 70, 75, 80, 85, 90, 95, or 100 amino acid residues in length. Additional non-exclusive preferred antigenic epitopes include the antigenic epitopes disclosed herein, as well as portions thereof. Antigenic epitopes are useful, for example, to raise antibodies, including monoclonal antibodies, that specifically bind the epitope. Preferred antigenic epitopes include the antigenic epitopes disclosed herein, as well as any combination of two, three, four, five or more of these antigenic epitopes. Antigenic epitopes can be used as the target molecules in immunoassays. (See, for instance, Wilson et al., Cell 37:767-778 (1984); Sutcliffe et al., Science 219:660-666 (1983)).

[0165] Non-limiting examples of epitopes of polypeptides that can be used to generate antibodies of the invention include a polypeptide comprising, or alternatively consisting of, at least one, two, three, four, five, six or more of the portion(s) of SEQ ID NO:Y specified in column 6 of Table 1A. These polypeptide fragments have been determined to bear antigenic epitopes of the proteins of the invention by the analysis of the Jameson-Wolf antigenic index, which is included in the DNAStar suite of computer programs. By “comprise” it is intended that a polypeptide contains at least one, two, three, four, five, six or more of the portion(s) of SEQ ID NO:Y shown in column 6 of Table 1A, but it may contain additional flanking residues on either the amino or carboxyl termini of the recited portion. Such additional flanking sequences are preferably sequences naturally found adjacent to the portion; i.e., contiguous sequence shown in SEQ ID NO:Y. The flanking sequence may, however, be sequences from a heterolgous polypeptide, such as from another protein described herein or from a heterologous polypeptide not described herein. In particular embodiments, epitope portions of a polypeptide of the invention comprise one, two, three, or more of the portions of SEQ ID NO:Y shown in column 6 of Table 1A. Polynucleotides encoding these polypeptides are also encompassed by the invention.

[0166] Similarly, immunogenic epitopes can be used, for example, to induce antibodies according to methods well known in the art. See, for instance, Sutcliffe et al., supra; Wilson et al., supra; Chow et al., Proc. Natl. Acad. Sci. USA 82:910-914; and Bittle et al., J. Gen. Virol. 66:2347-2354 (1985). Preferred immunogenic epitopes include the immunogenic epitopes disclosed herein, as well as any combination of two, three, four, five or more of these immunogenic epitopes. The polypeptides comprising one or more immunogenic epitopes may be presented for eliciting an antibody response together with a carrier protein, such as an albumin, to an animal system (such as rabbit or mouse), or, if the polypeptide is of sufficient length (at least about 25 amino acids), the polypeptide may be presented without a carrier. However, immunogenic epitopes comprising as few as 8 to 10 amino acids have been shown to be sufficient to raise antibodies capable of binding to, at the very least, linear epitopes in a denatured polypeptide (e.g., in Western blotting).

[0167] Epitope-bearing polypeptides of the present invention may be used to induce antibodies according to methods well known in the art including, but not limited to, in vivo immunization, in vitro immunization, and phage display methods. See, e.g., Sutcliffe et al., supra; Wilson et al., supra, and Bittle et al., J. Gen. Virol., 66:2347-2354 (1985). If in vivo immunization is used, animals may be immunized with free peptide; however, anti-peptide antibody titer may be boosted by coupling the peptide to a macromolecular carrier, such as keyhole limpet hemacyanin (KLH) or tetanus toxoid. For instance, peptides containing cysteine residues may be coupled to a carrier using a linker such as maleimidobenzoyl-N-hydroxysuccinimide ester (MBS), while other peptides may be coupled to carriers using a more general linking agent such as glutaraldehyde. Animals such as rabbits, rats and mice are immunized with either free or carrier-coupled peptides, for instance, by intraperitoneal and/or intradermal injection of emulsions containing about 100 μg of peptide or carrier protein and Freund's adjuvant or any other adjuvant known for stimulating an immune response. Several booster injections may be needed, for instance, at intervals of about two weeks, to provide a useful titer of anti-peptide antibody which can be detected, for example, by ELISA assay using free peptide adsorbed to a solid surface. The titer of anti-peptide antibodies in serum from an immunized animal may be increased by selection of anti-peptide antibodies, for instance, by adsorption to the peptide on a solid support and elution of the selected antibodies according to methods well known in the art.

[0168] As one of skill in the art will appreciate, and as discussed above, the polypeptides of the present invention (e.g., those comprising an immunogenic or antigenic epitope) can be fused to heterologous polypeptide sequences. For example, polypeptides of the present invention (including fragments or variants thereof), may be fused with the constant domain of immunoglobulins (IgA, IgE, IgG, IgM), or portions thereof (CH1, CH2, CH3, or any combination thereof and portions thereof, resulting in chimeric polypeptides. By way of another non-limiting example, polypeptides and/or antibodies of the present invention (including fragments or variants thereof) may be fused with albumin (including but not limited to recombinant human serum albumin or fragments or variants thereof (see, e.g., U.S. Pat. No. 5,876,969, issued Mar. 2, 1999, EP Patent 0 413 622, and U.S. Pat. No. 5,766,883, issued Jun. 16, 1998, herein incorporated by reference in their entirety)). In a preferred embodiment, polypeptides and/or antibodies of the present invention (including fragments or variants thereof) are fused with the mature form of human serum albumin (i.e., amino acids 1-585 of human serum albumin as shown in FIGS. 1 and 2 of EP Patent 0 322 094) which is herein incorporated by reference in its entirety. In another preferred embodiment, polypeptides and/or antibodies of the present invention (including fragments or variants thereof) are fused with polypeptide fragments comprising, or alternatively consisting of, amino acid residues 1-z of human serum albumin, where z is an integer from 369 to 419, as described in U.S. Pat. 5,766,883 herein incorporated by reference in its entirety. Polypeptides and/or antibodies of the present invention (including fragments or variants thereof) may be fused to either the N- or C-terminal end of the heterologous protein (e.g., immunoglobulin Fc polypeptide or human serum albumin polypeptide). Polynucleotides encoding fusion proteins of the invention are also encompassed by the invention.

[0169] Such fusion proteins as those described above may facilitate purification and may increase half-life in vivo. This has been shown for chimeric proteins consisting of the first two domains of the human CD4-polypeptide and various domains of the constant regions of the heavy or light chains of mammalian immunoglobulins. See, e.g., EP 394,827; Traunecker et al., Nature, 331:84-86 (1988). Enhanced delivery of an antigen across the epithelial barrier to the immune system has been demonstrated for antigens (e.g., insulin) conjugated to an FcRn binding partner such as IgG or Fc fragments (see, e.g., PCT Publications WO 96/22024 and WO 99/04813). IgG Fusion proteins that have a disulfide-linked dimeric structure due to the IgG portion desulfide bonds have also been found to be more efficient in binding and neutralizing other molecules than monomeric polypeptides or fragments thereof alone. See, e.g., Fountoulakis et al., J. Biochem., 270:3958-3964 (1995). Nucleic acids encoding the above epitopes can also be recombined with a gene of interest as an epitope tag (e.g., the hemagglutinin (HA) tag or flag tag) to aid in detection and purification of the expressed polypeptide. For example, a system described by Janknecht et al. allows for the ready purification of non-denatured fusion proteins expressed in human cell lines (Janknecht et al., 1991, Proc. Natl. Acad. Sci. USA 88:8972-897). In this system, the gene of interest is subcloned into a vaccinia recombination plasmid such that the open reading frame of the gene is translationally fused to an amino-terminal tag consisting of six histidine residues. The tag serves as a matrix binding domain for the fusion protein. Extracts from cells infected with the recombinant vaccinia virus are loaded onto Ni2+ nitriloacetic acid-agarose column and histidine-tagged proteins can be selectively eluted with imidazole-containing buffers.

[0170] Fusion Proteins

[0171] Any polypeptide of the present invention can be used to generate fusion proteins. For example, the polypeptide of the present invention, when fused to a second protein, can be used as an antigenic tag. Antibodies raised against the polypeptide of the present invention can be used to indirectly detect the second protein by binding to the polypeptide. Moreover, because secreted proteins target cellular locations based on trafficking signals, polypeptides of the present invention which are shown to be secreted can be used as targeting molecules once fused to other proteins.

[0172] Examples of domains that can be fused to polypeptides of the present invention include not only heterologous signal sequences, but also other heterologous functional regions. The fusion does not necessarily need to be direct, but may occur through linker sequences.

[0173] In certain preferred embodiments, proteins of the invention are fusion proteins comprising an amino acid sequence that is an N and/or C-terminal deletion of a polypeptide of the invention. In preferred embodiments, the invention is directed to a fusion protein comprising an amino acid sequence that is at least 80%, 85%, 90%, 95%, 96%, 97%, 98% or 99% identical to a polypeptide sequence of the invention. Polynucleotides encoding these proteins are also encompassed by the invention.

[0174] Moreover, fusion proteins may also be engineered to improve characteristics of the polypeptide of the present invention. For instance, a region of additional amino acids, particularly charged amino acids, may be added to the N-terminus of the polypeptide to improve stability and persistence during purification from the host cell or subsequent handling and storage. Also, peptide moieties may be added to the polypeptide to facilitate purification. Such regions may be removed prior to final preparation of the polypeptide. The addition of peptide moieties to facilitate handling of polypeptides is familiar and routine techniques in the art.

[0175] As one of skill in the art will appreciate that, as discussed above, polypeptides of the present invention, and epitope-bearing fragments thereof, can be combined with heterologous polypeptide sequences. For example, the polypeptides of the present invention may be fused with heterologous polypeptide sequences, for example, the polypeptides of the present invention may be fused with the constant domain of immunoglobulins (IgA, IgE, IgG, IgM) or portions thereof (CH1, CH2, CH3, and any combination thereof, including both entire domains and portions thereof), or albumin (including, but not limited to, native or recombinant human albumin or fragments or variants thereof (see, e.g., U.S. Pat. No. 5,876,969, issued Mar. 2, 1999, EP Patent 0 413 622, and U.S. Pat. No. 5,766,883, issued Jun. 16, 1998, herein incorporated by reference in their entirety)), resulting in chimeric polypeptides. For example, EP-A-O 464 533 (Canadian counterpart 2045869) discloses fusion proteins comprising various portions of constant region of immunoglobulin molecules together with another human protein or part thereof. In many cases, the Fc part in a fusion protein is beneficial in therapy and diagnosis, and thus can result in, for example, improved pharmacokinetic properties (EP-A 0232 262). Alternatively, deleting the Fc part after the fusion protein has been expressed, detected, and purified, would be desired. For example, the Fc portion may hinder therapy and diagnosis if the fusion protein is used as an antigen for immunizations. In drug discovery, for example, human proteins, such as hIL-5, have been fused with Fc portions for the purpose of high-throughput screening assays to identify antagonists of hIL-5. See, D. Bennett et al., J. Molecular Recognition 8:52-58 (1995); K. Johanson et al., J. Biol. Chem. 270:9459-9471 (1995).

[0176] Moreover, the polypeptides of the present invention can be fused to marker sequences, such as a polypeptide, which facilitates purification of the fused polypeptide. In preferred embodiments, the marker amino acid sequence is a hexa-histidine peptide, such as the tag provided in a pQE vector (QIAGEN, Inc., 9259 Eton Avenue, Chatsworth, Calif., 91311), among others, many of which are commercially available. As described in Gentz et al., Proc. Natl. Acad. Sci. USA 86:821-824 (1989), for instance, hexa-histidine provides for convenient purification of the fusion protein. Another peptide tag useful for purification, the “HA” tag, corresponds to an epitope derived from the influenza hemagglutinin protein (Wilson et al., Cell 37:767 (1984).)

[0177] Additional fusion proteins of the invention may be generated through the techniques of gene-shuffling, motif-shuffling, exon-shuffling, and/or codon-shuffling (collectively referred to as “DNA shuffling”), briefly described below, and further described herein. DNA shuffling may be employed to modulate the activities of polypeptides of the invention, such methods can be used to generate polypeptides with altered activity, as well as agonists and antagonists of the polypeptides. See, generally, U.S. Pat. Nos. 5,605,793; 5,811,238; 5,830,721; 5,834,252; and 5,837,458, and Patten et al., Curr. Opinion Biotechnol. 8:724-33 (1997); Harayama, Trends Biotechnol. 16(2):76-82 (1998); Hansson et al., J. Mol. Biol. 287:265-76 (1999); and Lorenzo and Blasco, Biotechniques 24(2):308-13 (1998); each of these patents and publications are hereby incorporated by reference in its entirety). In a preferred embodiment, one or more components, motifs, sections, parts, domains, fragments, etc., of a polynucleotide encoding a polypeptide of the invention may be recombined with one or more components, motifs, sections, parts, domains, fragments, etc., of one or more heterologous molecules encoding a heterologous polypeptide.

[0178] Thus, any of these above fusions can be engineered using the polynucleotides or the polypeptides of the present invention.

[0179] Recombinant and Synthetic Production of Polypeptides of the Invention

[0180] The present invention also relates to vectors containing the polynucleotide of the present invention, host cells, and the production of polypeptides by synthetic and recombinant techniques. The vector may be, for example, a phage, plasmid, viral, or retroviral vector. Retroviral vectors may be replication competent or replication defective. In the latter case, viral propagation generally will occur only in complementing host cells.

[0181] The polynucleotides of the invention may be joined to a vector containing a selectable marker for propagation in a host. Generally, a plasmid vector is introduced in a precipitate, such as a calcium phosphate precipitate, or in a complex with a charged lipid. If the vector is a virus, it may be packaged in vitro using an appropriate packaging cell line and then transduced into host cells.

[0182] The polynucleotide insert should be operatively linked to an appropriate promoter, such as the phage lambda PL promoter, the E. coli lac, trp, phoA and tac promoters, the SV40 early and late promoters and promoters of retroviral LTRs, to name a few. Other suitable promoters will be known to the skilled artisan. The expression constructs will further contain sites for transcription initiation, termination, and, in the transcribed region, a ribosome binding site for translation. The coding portion of the transcripts expressed by the constructs will preferably include a translation initiating codon at the beginning and a termination codon (UAA, UGA or UAG) appropriately positioned at the end of the polypeptide to be translated.

[0183] As indicated, the expression vectors will preferably include at least one selectable marker. Such markers include dihydrofolate reductase, G418 or neomycin resistance, glutamine synthase, for eukaryotic cell culture and tetracycline, kanamycin or ampicillin resistance genes for culturing in E. coli and other bacteria. Representative examples of appropriate hosts include, but are not limited to, bacterial cells, such as E. coli, Streptomyces and Salmonella typhimurium cells; fungal cells, such as yeast cells (e.g., Saccharomyces cerevisiae or Pichia pastoris (ATCC Accession No. 201178)); insect cells such as Drosophila S2 and Spodoptera Sf9 cells; animal cells such as CHO, COS, 293, NSO and Bowes melanoma cells; and plant cells. Appropriate culture mediums and conditions for the above-described host cells are known in the art.

[0184] Among vectors preferred for use in bacteria include pQE70, pQE60 and pQE-9, available from QIAGEN, Inc.; pBluescript vectors, Phagescript vectors, pNH8A, pNH16a, pNH18A, pNH46A, available from Stratagene Cloning Systems, Inc.; and ptrc99a, pKK223-3, pKK233-3, pDR540, pRIT5 available from Pharmacia Biotech, Inc. Among preferred eukaryotic vectors are pWLNEO, pSV2CAT, pOG44, pXT1 and pSG available from Stratagene; and pSVK3, pBPV, pMSG and pSVL available from Pharmacia. Preferred expression vectors for use in yeast systems include, but are not limited to pYES2, pYD1, pTEF1/Zeo, pYES2/GS, pPICZ, pGAPZ, pGAPZalph, pPIC9, pPIC3.5, pHIL-D2, pHIL-S1, pPIC3.5K, pPIC9K, and PAO815 (all available from Invitrogen, Carlsbad, Calif.). Other suitable vectors will be readily apparent to the skilled artisan.

[0185] Vectors which use glutamine synthase (GS) or DHFR as the selectable markers can be amplified in the presence of the drugs methionine sulphoximine or methotrexate, respectively. An advantage of glutamine synthase based vectors is the availabilty of cell lines (e.g., the murine myeloma cell line, NS0) which are glutamine synthase negative. Glutamine synthase expression systems can also function in glutamine synthase expressing cells (e.g., Chinese Hamster Ovary (CHO) cells) by providing additional inhibitor to prevent the functioning of the endogenous gene. A glutamine synthase expression system and components thereof are detailed in PCT publications: WO87/04462; WO86/05807; WO89/01036; WO89/10404; and WO91/06657 which are hereby incorporated in their entireties by reference herein. Additionally, glutamine synthase expression vectors can be obtained from Lonza Biologics, Inc. (Portsmouth, N.H.). Expression and production of monoclonal antibodies using a GS expression system in murine myeloma cells is described in Bebbington et al., Bio/technology 10:169(1992) and in Biblia and Robinson Biotechnol. Prog. 11:1 (1995) which are herein incorporated by reference.

[0186] The present invention also relates to host cells containing the above-described vector constructs described herein, and additionally encompasses host cells containing nucleotide sequences of the invention that are operably associated with one or more heterologous control regions (e.g., promoter and/or enhancer) using techniques known of in the art. The host cell can be a higher eukaryotic cell, such as a mammalian cell (e.g., a human derived cell), or a lower eukaryotic cell, such as a yeast cell, or the host cell can be a prokaryotic cell, such as a bacterial cell. A host strain may be chosen, which modulates the expression of the inserted gene sequences, or modifies and processes the gene product in the specific fashion desired. Expression from certain promoters can be elevated in the presence of certain inducers; thus expression of the genetically engineered polypeptide may be controlled. Furthermore, different host cells have characteristics and specific mechanisms for the translational and post-translational processing and modification (e.g., phosphorylation, cleavage) of proteins. Appropriate cell lines can be chosen to ensure the desired modifications and processing of the foreign protein expressed.

[0187] Introduction of the nucleic acids and nucleic acid constructs of the invention into the host cell can be effected by calcium phosphate transfection, DEAE-dextran mediated transfection, cationic lipid-mediated transfection, electroporation, transduction, infection, or other methods. Such methods are described in many standard laboratory manuals, such as Davis et al., Basic Methods In Molecular Biology (1986). It is specifically contemplated that the polypeptides of the present invention may in fact be expressed by a host cell lacking a recombinant vector.

[0188] In addition to encompassing host cells containing the vector constructs discussed herein, the invention also encompasses primary, secondary, and immortalized host cells of vertebrate origin, particularly mammalian origin, that have been engineered to delete or replace endogenous genetic material (e.g., colon antigen coding sequence), and/or to include genetic material (e.g., heterologous polynucleotide sequences) that is operably associated with colon associated polynucleotides of the invention, and which activates, alters, and/or amplifies endogenous colon associated polynucleotides. For example, techniques known in the art may be used to operably associate heterologous control regions (e.g., promoter and/or enhancer) and endogenous colon associated polynucleotide sequences via homologous recombination (see, e.g., U.S. Pat. No. 5,641,670, issued Jun. 24, 1997; International Publication Number WO 96/29411; International Publication Number WO 94/12650; Koller et al., Proc. Natl. Acad. Sci. USA 86:8932-8935 (1989); and Zijlstra et al., Nature 342:435-438 (1989), the disclosures of each of which are incorporated by reference in their entireties).

[0189] Polypeptides of the present invention can also be recovered from: products purified from natural sources, including bodily fluids, tissues and cells, whether directly isolated or cultured; products of chemical synthetic procedures; and products produced by recombinant techniques from a prokaryotic or eukaryotic host, including, for example, bacterial, yeast, higher plant, insect, and mammalian cells. Depending upon the host employed in a recombinant production procedure, the polypeptides of the present invention may be glycosylated. or may be non-glycosylated. In addition, polypeptides of the invention may also include an initial modified methionine residue, in some cases as a result of host-mediated processes. Thus, it is well known in the art that the N-terminal methionine encoded by the translation initiation codon generally is removed with high efficiency from any protein after translation in all eukaryotic cells. While the N-terminal methionine on most proteins also is efficiently removed in most prokaryotes, for some proteins, this prokaryotic removal process is inefficient, depending on the nature of the amino acid to which the N-terminal methionine is covalently linked.

[0190] In one embodiment, the yeast Pichia pastoris is used to express polypeptides of the invention in a eukaryotic system. Pichia pastoris is a methylotrophic yeast which can metabolize methanol as its sole carbon source. A main step in the methanol metabolization pathway is the oxidation of methanol to formaldehyde using O₂. This reaction is catalyzed by the enzyme alcohol oxidase. In order to metabolize methanol as its sole carbon source, Pichia pastoris must generate high levels of alcohol oxidase due, in part, to the relatively low affinity of alcohol oxidase for O₂. Consequently, in a growth medium depending on methanol as a main carbon source, the promoter region of one of the two alcohol oxidase genes (AOX1) is highly active. In the presence of methanol, alcohol oxidase produced from the AOX1 gene comprises up to approximately 30% of the total soluble protein in Pichia pastoris. See, Ellis, S. B., et al., Mol. Cell. Biol. 5:1111-21 (1985); Koutz, P. J, et al., Yeast 5:167-77 (1989); Tschopp, J. F., et al., Nucl. Acids Res. 15:3859-76 (1987). Thus, a heterologous coding sequence, such as, for example, a polynucleotide of the present invention, under the transcriptional regulation of all or part of the AOX1 regulatory sequence is expressed at exceptionally high levels in Pichia yeast grown in the presence of methanol.

[0191] In one example, the plasmid vector pPIC9K is used to express DNA encoding a polypeptide of the invention, as set forth herein, in a Pichea yeast system essentially as described in “Pichia Protocols: Methods in Molecular Biology,” D. R. Higgins and J. Cregg, eds. The Humana Press, Totowa, N.J., 1998. This expression vector allows expression and secretion of a polypeptide of the invention by virtue of the strong AOX1 promoter linked to the Pichia pastoris alkaline phosphatase (PHO) secretory signal peptide (i.e., leader) located upstream of a multiple cloning site.

[0192] Many other yeast vectors could be used in place of pPIC9K, such as, pYES2, pYD1, pTEF1/Zeo, pYES2/GS, pPICZ, pGAPZ, pGAPZalpha, pPIC9, pPIC3.5, pHIL-D2, pHIL-S1, pPIC3.5K, and PA0815, as one skilled in the art would readily appreciate, as long as the proposed expression construct provides appropriately located signals for transcription, translation, secretion (if desired), and the like, including an in-frame AUG as required.

[0193] In another embodiment, high-level expression of a heterologous coding sequence, such as, for example, a polynucleotide of the present invention, may be achieved by cloning the heterologous polynucleotide of the invention into an expression vector such as, for example, pGAPZ or pGAPZalpha, and growing the yeast culture in the absence of methanol.

[0194] In addition to encompassing host cells containing the vector constructs discussed herein, the invention also encompasses primary, secondary, and immortalized host cells of vertebrate origin, particularly mammalian origin, that have been engineered to delete or replace endogenous genetic material (e.g., coding sequence), and/or to include genetic material (e.g., heterologous polynucleotide sequences) that is operably associated with polynucleotides of the invention, and which activates, alters, and/or amplifies endogenous polynucleotides. For example, techniques known in the art may be used to operably associate heterologous control regions (e.g., promoter and/or enhancer) and endogenous polynucleotide sequences via homologous recombination (see, e.g., U.S. Pat. No. 5,641,670, issued Jun. 24, 1997; International Publication No. WO 96/29411, published Sep. 26, 1996; International Publication No. WO 94/12650, published Aug. 4, 1994; Koller et al., Proc. Natl. Acad. Sci. USA 86:8932-8935 (1989); and Zijlstra et al., Nature 342:435-438 (1989), the disclosures of each of which are incorporated by reference in their entireties).

[0195] In addition, polypeptides of the invention can be chemically synthesized using techniques known in the art (e.g., see Creighton, 1983, Proteins: Structures and Molecular Principles, W. H. Freeman & Co., N.Y., and Hunkapiller et al., Nature, 310:105-111 (1984)). For example, a polypeptide corresponding to a fragment of a polypeptide can be synthesized by use of a peptide synthesizer. Furthermore, if desired, nonclassical amino acids or chemical amino acid analogs can be introduced as a substitution or addition into the polypeptide sequence. Non-classical amino acids include, but are not limited to, to the D-isomers of the common amino acids, 2,4-diaminobutyric acid, a-amino isobutyric acid, 4-aminobutyric acid, Abu, 2-amino butyric acid, g-Abu, e-Ahx, 6-amino hexanoic acid, Aib, 2-amino isobutyric acid, 3-amino propionic acid, omithine, norleucine, norvaline, hydroxyproline, sarcosine, citrulline, homocitrulline, cysteic acid, t-butylglycine, t-butylalanine, phenylglycine, cyclohexylalanine, b-alanine, fluoro-amino acids, designer amino acids such as b-methyl amino acids, Ca-methyl amino acids, Na-methyl amino acids, and amino acid analogs in general. Furthermore, the amino acid can be D (dextrorotary) or L (levorotary).

[0196] The invention encompasses polypeptides of the present invention which are differentially modified during or after translation, e.g., by glycosylation, acetylation, phosphorylation, amidation, derivatization by known protecting/blocking groups, proteolytic cleavage, linkage to an antibody molecule or other cellular ligand, etc. Any of numerous chemical modifications may be carried out by known techniques, including but not limited, to specific chemical cleavage by cyanogen bromide, trypsin, chymotrypsin, papain, V8 protease, NaBH₄; acetylation, formylation, oxidation, reduction; metabolic synthesis in the presence of tunicamycin; etc.

[0197] Additional post-translational modifications encompassed by the invention include, for example, e.g., N-linked or O-linked carbohydrate chains, processing of N-terminal or C-terminal ends), attachment of chemical moieties to the amino acid backbone, chemical modifications of N-linked or O-linked carbohydrate chains, and addition or deletion of an N-terminal methionine residue as a result of procaryotic host cell expression. The polypeptides may also be modified with a detectable label, such as an enzymatic, fluorescent, isotopic or affinity label to allow for detection and isolation of the protein.

[0198] Examples of suitable enzymes include horseradish peroxidase, alkaline phosphatase, beta-galactosidase, or acetylcholinesterase; examples of suitable prosthetic group complexes include streptavidin/biotin and avidin/biotin; examples of suitable fluorescent materials include umbelliferone, fluorescein, fluorescein isothiocyanate, rhodamine, dichlorotriazinylamine fluorescein, dansyl chloride or phycoerythrin; an example of a luminescent material includes luminol; examples of bioluminescent materials include luciferase, luciferin, and aequorin; and examples of suitable radioactive material include iodine (¹²¹I, ¹²³I, ¹²⁵I, ¹³¹I), carbon (¹⁴C), sulfur (³⁵S), tritium (³H), indium (¹¹¹In, ¹¹²In, ^{113m}In, ^{115m}In), technetium (⁹⁹Tc, ^{99m}Tc), thallium (²⁰¹Ti), gallium (⁶⁸Ga, ⁶⁷Ga), palladium (¹⁰³Pd), molybdenum (⁹⁹Mo), xenon (¹³³Xe), fluorine (¹⁸F), ¹⁵³Sm, ¹⁷⁷Lu, ¹⁵⁹Gd, ¹⁴⁹Pm, ¹⁴⁰La, ¹⁷⁵Yb, ¹⁶⁶Ho, ⁹⁰Y, ⁴⁷Sc, ¹⁸⁶Re, ¹⁸⁸Re, ¹⁴²Pr, ¹⁰⁵Rh, and ⁹⁷Ru.

[0199] In specific embodiments, a polypeptide of the present invention or fragment or variant thereof is attached to macrocyclic chelators that associate with radiometal ions, including but not limited to, ¹⁷⁷Lu, ⁹⁰Y, ¹⁶⁶Ho, and ¹⁵³Sm, to polypeptides. In a preferred embodiment, the radiometal ion associated with the macrocyclic chelators is ¹¹¹In. In another preferred embodiment, the radiometal ion associated with the macrocyclic chelator is ⁹⁰Y. In specific embodiments, the macrocyclic chelator is 1,4,7,10-tetraazacyclododecane-N,N′,N″,N′″-tetraacetic acid (DOTA). In other specific embodiments, DOTA is attached to an antibody of the invention or fragment thereof via a linker molecule. Examples of linker molecules useful for conjugating DOTA to a polypeptide are commonly known in the art—see, for example, DeNardo et al., Clin Cancer Res. 4(10):2483-90 (1998); Peterson et al., Bioconjug. Chem. 10(4):553-7 (1999); and Zimmerman et al, Nucl. Med. Biol. 26(8):943-50 (1999); which are hereby incorporated by reference in their entirety.

[0200] As mentioned, the colon associated proteins of the invention may be modified by either natural processes, such as posttranslational processing, or by chemical modification techniques which are well known in the art. It will be appreciated that the same type of modification may be present in the same or varying degrees at several sites in a given colon associated polypeptide. Colon associated polypeptides may be branched, for example, as a result of ubiquitination, and they may be cyclic, with or without branching. Cyclic, branched, and branched cyclic colon associated polypeptides may result from posttranslation natural processes or may be made by synthetic methods. Modifications include acetylation, acylation, ADP-ribosylation, amidation, covalent attachment of flavin, covalent attachment of a heme moiety, covalent attachment of a nucleotide or nucleotide derivative, covalent attachment of a lipid or lipid derivative, covalent attachment of phosphotidylinositol, cross-linking, cyclization, disulfide bond formation, demethylation, formation of covalent cross-links, formation of cysteine, formation of pyroglutamate, formylation, gamma-carboxylation, glycosylation, GPI anchor formation, hydroxylation, iodination, methylation, myristoylation, oxidation, pegylation, proteolytic processing, phosphorylation, prenylation, racemization, selenoylation, sulfation, transfer-RNA mediated addition of amino acids to proteins such as arginylation, and ubiquitination. (See, for instance, PROTEINS—STRUCTURE AND MOLECULAR PROPERTIES, 2nd Ed., T. E. Creighton, W. H. Freeman and Company, New York (1993); POSTTRANSLATIONAL COVALENT MODIFICATION OF PROTEINS, B. C. Johnson, Ed., Academic Press, New York, pgs. 1-12 (1983); Seifter et al., Meth. Enzymol. 182:626-646 (1990); Rattan et al., Ann. N.Y. Acad. Sci. 663:48-62 (1992)).

[0201] Also provided by the invention are chemically modified derivatives of the polypeptides of the invention which may provide additional advantages such as increased solubility, stability and circulating time of the polypeptide, or decreased immunogenicity (see U.S. Pat. No. 4,179,337). The chemical moieties for derivitization may be selected from water soluble polymers such as polyethylene glycol, ethylene glycol/propylene glycol copolymers, carboxymethylcellulose, dextran, polyvinyl alcohol and the like. The polypeptides may be modified at random positions within the molecule, or at predetermined positions within the molecule and may include one, two, three or more attached chemical moieties.

[0202] The polymer may be of any molecular weight, and may be branched or unbranched. For polyethylene glycol, the preferred molecular weight is between about 1 kDa and about 100 kDa (the term “about” indicating that in preparations of polyethylene glycol, some molecules will weigh more, some less, than the stated molecular weight) for ease in handling and manufacturing. Other sizes may be used, depending on the desired therapeutic profile (e.g., the duration of sustained release desired, the effects, if any on biological activity, the ease in handling, the degree or lack of antigenicity and other known effects of the polyethylene glycol to a therapeutic protein or analog). For example, the polyethylene glycol may have an average molecular weight of about 200, 500, 1000, 1500, 2000, 2500, 3000, 3500, 4000, 4500, 5000, 5500, 6000, 6500, 7000, 7500, 8000, 8500, 9000, 9500, 10,000, 10,500, 11,000, 11,500, 12,000, 12,500, 13,000, 13,500, 14,000, 14,500, 15,000, 15,500, 16,000, 16,500, 17,000, 17,500, 18,000, 18,500, 19,000, 19,500, 20,000, 25,000, 30,000, 35,000, 40,000, 50,000, 55,000, 60,000, 65,000, 70,000, 75,000, 80,000, 85,000, 90,000, 95,000, or 100,000 kDa.

[0203] As noted above, the polyethylene glycol may have a branched structure. Branched polyethylene glycols are described, for example, in U.S. Pat. No. 5,643,575; Morpurgo et al., Appl. Biochem. Biotechnol. 56:59-72 (1996); Vorobjev et al., Nucleosides Nucleotides 18:2745-2750 (1999); and Caliceti et al., Bioconjug. Chem. 10:638-646 (1999), the disclosures of each of which are incorporated herein by reference.

[0204] The polyethylene glycol molecules (or other chemical moieties) should be attached to the protein with consideration of effects on functional or antigenic domains of the protein. There are a number of attachment methods available to those skilled in the art, such as, for example, the method disclosed in EP 0 401 384 (coupling PEG to G-CSF), herein incorporated by reference; see also Malik et al., Exp. Hematol. 20:1028-1035 (1992), reporting pegylation of GM-CSF using tresyl chloride. For example, polyethylene glycol may be covalently bound through amino acid residues via a reactive group, such as a free amino or carboxyl group. Reactive groups are those to which an activated polyethylene glycol molecule may be bound. The amino acid residues having a free amino group may include lysine residues and the N-terminal amino acid residues; those having a free carboxyl group may include aspartic acid residues glutamic acid residues and the C-terminal amino acid residue. Sulfhydryl groups may also be used as a reactive group for attaching the polyethylene glycol molecules. Preferred for therapeutic purposes is attachment at an amino group, such as attachment at the N-terminus or lysine group.

[0205] As suggested above, polyethylene glycol may be attached to proteins via linkage to any of a number of amino acid residues. For example, polyethylene glycol can be linked to proteins via covalent bonds to lysine, histidine, aspartic acid, glutamic acid, or cysteine residues. One or more reaction chemistries may be employed to attach polyethylene glycol to specific amino acid residues (e.g., lysine, histidine, aspartic acid, glutamic acid, or cysteine) of the protein or to more than one type of amino acid residue (e.g., lysine, histidine, aspartic acid, glutamic acid, cysteine and combinations thereof) of the protein.

[0206] One may specifically desire proteins chemically modified at the N-terminus. Using polyethylene glycol as an illustration of the present composition, one may select from a variety of polyethylene glycol molecules (by molecular weight, branching, etc.), the proportion of polyethylene glycol molecules to protein (polypeptide) molecules in the reaction mix, the type of pegylation reaction to be performed, and the method of obtaining the selected N-terminally pegylated protein. The method of obtaining the N-terminally pegylated preparation (i.e., separating this moiety from other monopegylated moieties if necessary) may be by purification of the N-terminally pegylated material from a population of pegylated protein molecules. Selective proteins chemically modified at the N-terminus modification may be accomplished by reductive alkylation which exploits differential reactivity of different types of primary amino groups (lysine versus the N-terminal) available for derivatization in a particular protein. Under the appropriate reaction conditions, substantially selective derivatization of the protein at the N-terminus with a carbonyl group containing polymer is achieved.

[0207] As indicated above, pegylation of the proteins of the invention may be accomplished by any number of means. For example, polyethylene glycol may be attached to the protein either directly or by an intervening linker. Linkerless systems for attaching polyethylene glycol to proteins are described in Delgado et al., Crit. Rev. Thera. Drug Carrier Sys. 9:249-304 (1992); Francis et al., Intern. J. of Hematol. 68:1-18 (1998); U.S. Pat. Nos. 4,002,531; 5,349,052; WO 95/06058; and WO 98/32466, the disclosures of each of which are incorporated herein by reference.

[0208] One system for attaching polyethylene glycol directly to amino acid residues of proteins without an intervening linker employs tresylated MPEG, which is produced by the modification of monmethoxy polyethylene glycol (MPEG) using tresylchloride (ClSO₂CH₂CF₃). Upon reaction of protein with tresylated MPEG, polyethylene glycol is directly attached to amine groups of the protein. Thus, the invention includes protein-polyethylene glycol conjugates produced by reacting proteins of the invention with a polyethylene glycol molecule having a 2,2,2-trifluoreothane sulphonyl group.

[0209] Polyethylene glycol can also be attached to proteins using a number of different intervening linkers. For example, U.S. Pat. No. 5,612,460, the entire disclosure of which is incorporated herein by reference, discloses urethane linkers for connecting polyethylene glycol to proteins. Protein-polyethylene glycol conjugates wherein the polyethylene glycol is attached to the protein by a linker can also be produced by reaction of proteins with compounds such as MPEG-succinimidylsuccinate, MPEG activated with 1,1′-carbonyldiimidazole, MPEG-2,4,5-trichloropenylcarbonate, MPEG-p-nitrophenolcarbonate, and various MPEG-succinate derivatives. A number of additional polyethylene glycol derivatives and reaction chemistries for attaching polyethylene glycol to proteins are described in International Publication No. WO 98/32466, the entire disclosure of which is incorporated herein by reference. Pegylated protein products produced using the reaction chemistries set out herein are included within the scope of the invention.

[0210] The number of polyethylene glycol moieties attached to each protein of the invention (i.e., the degree of substitution) may also vary. For example, the pegylated proteins of the invention may be linked, on average, to 1, 2, 3, 4, 5, 6, 7, 8, 9, 10, 12, 15, 17, 20, or more polyethylene glycol molecules. Similarly, the average degree of substitution within ranges such as 1-3, 2-4, 3-5, 4-6, 5-7, 6-8, 7-9, 8-10, 9-11, 10-12, 11-13, 12-14, 13-15, 14-16, 15-17, 16-18, 17-19, or 18-20 polyethylene glycol moieties per protein molecule. Methods for determining the degree of substitution are discussed, for example, in Delgado et al., Crit. Rev. Thera. Drug Carrier Sys. 9:249-304 (1992).

[0211] The colon associated polypeptides of the invention can be recovered and purified from chemical synthesis and recombinant cell cultures by standard methods which include, but are not limited to, ammonium sulfate or ethanol precipitation, acid extraction, anion or cation exchange chromatography, phosphocellulose chromatography, hydrophobic interaction chromatography, affinity chromatography, hydroxylapatite chromatography and lectin chromatography. Most preferably, high performance liquid chromatography (“HPLC”) is employed for purification. Well known techniques for refolding protein may be employed to regenerate active conformation when the polypeptide is denatured during isolation and/or purification.

[0212] Colon associated polynucleotides and polypeptides may be used in accordance with the present invention for a variety of applications, particularly those that make use of the chemical and biological properties of colon associated antigens. Among these are applications in the detection, prevention, diagnosis and/or treatment of diseases associated with the colon, such as e.g., colon cancer, tumors, congenital abnormalities, such as atresia and stenosis, Meckel diverticulum, congential aganglionic megacolon or Hirschsprung disease; colonic diverticulitis, colonic diverticulosis, toxic megacolon, constipation, disorders caused by parasites and protozoa (e.g., amoebic colitis, anisakiasis, balantidiasis, blastocystis infections, cryptosporidiosis, dientamoebiasis, amoebic dysentery, giardiasis, Lymphopathia venereum, Entamoeba histolytica), bacteria infection (e.g., Shigella, Salmonella, Yersinia, E. coli, Clostridium difficile), viral infection (e.g., cytomegalic virus, rotovirus); inflammatory bowel disease (e.g., ulcerative colitis, Crohn's disease, eosinophilic colitis); neoplastic disorders, such as, polyps (e.g., sessile polyp, adenomatous polyp, inflammatory polyps), adenomas (e.g., tubular adenoma, tubovillous adenomas, villous adenoma, Gardner syndrome, Peutz-Jeghers syndrome), hyperplastic, polyposis, villous, pseudopolyps, leiomyomas, carcinoids, lipomas, and angiomas, cancers, such as, rectal cancer, adenocarcinoma, colorectal carcinoma, colon cancer, colon carcinoma, colorectal cancer; colonic diseases); miscellaneous intestinal inflammatory disorders, including acquired immunodeficiency syndrome, HIV enteropathy, transplantation, drug-induced intestinal injury, radiation enterocolitis, neutropenic colitis, diverticular colon disease (DCD), inflammatory colonic disease, ischemic colitis, radiation proctitis, non-inflammatory bowel disease (non-IBD), colonic inflammation; colitis (e.g., infectious enterocolitis, necrotizing enterocolitis, antibiotic-associated colitis (pseudomembranous colitis), and collagenous and lymphocytic colitis); diarrhea and dysentary, malabsorption syndromes (e.g., blind loop syndrome, lactose intolerance, short bowl syndrome, whipple's disease), mesenteric vascular occlusion, pneumatosis cystoides intestinalis, protein-losing enteropathies (intestinal lymphagiectasis); intestinal obstruction (e.g., afferent loop syndrome, impacted feces, intestinal pseudo-obstruction [cecal volvulus], intussusception), intestinal perforation, sigmoid diseases (e.g., proctocolitis, sigmoin neoplasms), and/or as described under “Gastrointestinal Disorders” below.

[0213] Additional applications relate to diagnosis and to treatment of disorders of cells, tissues and organisms. These aspects of the invention are discussed further below.

[0214] In a preferred embodiment, polynucleotides expressed in a particular tissue type are used to detect, diagnose, treat, prevent and/or prognose disorders associated with the tissue type.

[0215] The polypeptides of the invention may be in monomers or multimers (i.e., dimers, trimers, tetramers and higher multimers). Accordingly, the present invention relates to monomers and multimers of the polypeptides of the invention, their preparation, and compositions (preferably, Therapeutics) containing them. In specific embodiments, the polypeptides of the invention are monomers, dimers, trimers or tetramers. In additional embodiments, the multimers of the invention are at least dimers, at least trimers, or at least tetramers.

[0216] Multimers encompassed by the invention may be homomers or heteromers. As used herein, the term homomer refers to a multimer containing only polypeptides corresponding to a protein of the invention (e.g., the amino acid sequence of SEQ ID NO:Y, an amino acid sequence encoded by SEQ ID NO:X or the complement of SEQ ID NO:X, the amino acid sequence encoded by the portion of SEQ ID NO:X as defined in columns 8 and 9 of Table 2, and/or an amino acid sequence encoded by cDNA contained in Clone ID NO:Z (including fragments, variants, splice variants, and fusion proteins, corresponding to these as described herein)). These homomers may contain polypeptides having identical or different amino acid sequences. In a specific embodiment, a homomer of the invention is a multimer containing only polypeptides having an identical amino acid sequence. In another specific embodiment, a homomer of the invention is a multimer containing polypeptides having different amino acid sequences. In specific embodiments, the multimer of the invention is a homodimer (e.g., containing two polypeptides having identical or different amino acid sequences) or a homotrimer (e.g., containing three polypeptides having identical and/or different amino acid sequences). In additional embodiments, the homomeric multimer of the invention is at least a homodimer, at least a homotrimer, or at least a homotetramer.

[0217] As used herein, the term heteromer refers to a multimer containing two or more heterologous polypeptides (i.e., polypeptides of different proteins) in addition to the polypeptides of the invention. In a specific embodiment, the multimer of the invention is a heterodimer, a heterotrimer, or a heterotetramer. In additional embodiments, the heteromeric multimer of the invention is at least a heterodimer, at least a heterotrimer, or at least a heterotetramer.

[0218] Multimers of the invention may be the result of hydrophobic, hydrophilic, ionic and/or covalent associations and/or may be indirectly linked by, for example, liposome formation. Thus, in one embodiment, multimers of the invention, such as, for example, homodimers or homotrimers, are formed when polypeptides of the invention contact one another in solution. In another embodiment, heteromultimers of the invention, such as, for example, heterotrimers or heterotetramers, are formed when polypeptides of the invention contact antibodies to the polypeptides of the invention (including antibodies to the heterologous polypeptide sequence in a fusion protein of the invention) in solution. In other embodiments, multimers of the invention are formed by covalent associations with and/or between the polypeptides of the invention. Such covalent associations may involve one or more amino acid residues contained in the polypeptide sequence (e.g., that recited in SEQ ID NO:Y, encoded by the portion of SEQ ID NO:X as defined in columns 8 and 9 of Table 2, and/or encoded by the cDNA contained in Clone ID NO:Z). In one instance, the covalent associations are cross-linking between cysteine residues located within the polypeptide sequences which interact in the native (i.e., naturally occurring) polypeptide. In another instance, the covalent associations are the consequence of chemical or recombinant manipulation. Alternatively, such covalent associations may involve one or more amino acid residues contained in the heterologous polypeptide sequence in a fusion protein. In one example, covalent associations are between the heterologous sequence contained in a fusion protein of the invention (see, e.g., U.S. Pat. No. 5,478,925). In a specific example, the covalent associations are between the heterologous sequence contained in a Fc fusion protein of the invention (as described herein). In another specific example, covalent associations of fusion proteins of the invention are between heterologous polypeptide sequence from another protein that is capable of forming covalently associated multimers, such as for example, osteoprotegerin (see, e.g., International Publication NO: WO 98/49305, the contents of which are herein incorporated by reference in its entirety). In another embodiment, two or more polypeptides of the invention are joined through peptide linkers. Examples include those peptide linkers described in U.S. Pat. No. 5,073,627 (hereby incorporated by reference). Proteins comprising multiple polypeptides of the invention separated by peptide linkers may be produced using conventional recombinant DNA technology.

[0219] Another method for preparing multimer polypeptides of the invention involves use of polypeptides of the invention fused to a leucine zipper or isoleucine zipper polypeptide sequence. Leucine zipper and isoleucine zipper domains are polypeptides that promote multimerization of the proteins in which they are found. Leucine zippers were originally identified in several DNA-binding proteins (Landschulz et al., Science 240:1759, (1988)), and have since been found in a variety of different proteins. Among the known leucine zippers are naturally occurring peptides and derivatives thereof that dimerize or trimerize. Examples of leucine zipper domains suitable for producing soluble multimeric proteins of the invention are those described in PCT application WO 94/10308, hereby incorporated by reference. Recombinant fusion proteins comprising a polypeptide of the invention fused to a polypeptide sequence that dimerizes or trimerizes in solution are expressed in suitable host cells, and the resulting soluble multimeric fusion protein is recovered from the culture supernatant using techniques known in the art.

[0220] Trimeric polypeptides of the invention may offer the advantage of enhanced biological activity. Preferred leucine zipper moieties and isoleucine moieties are those that preferentially form trimers. One example is a leucine zipper derived from lung surfactant protein D (SPD), as described in Hoppe et al. (FEBS Letters 344:191, (1994)) and in U.S. patent application Ser. No. 08/446,922, hereby incorporated by reference. Other peptides derived from naturally occurring trimeric proteins may be employed in preparing trimeric polypeptides of the invention.

[0221] In another example, proteins of the invention are associated by interactions between Flag® polypeptide sequence contained in fusion proteins of the invention containing Flag® polypeptide sequence. In a further embodiment, proteins of the invention are associated by interactions between heterologous polypeptide sequence contained in Flag® fusion proteins of the invention and anti-Flag® antibody.

[0222] The multimers of the invention may be generated using chemical techniques known in the art. For example, polypeptides desired to be contained in the multimers of the invention may be chemically cross-linked using linker molecules and linker molecule length optimization techniques known in the art (see, e.g., U.S. Pat. No. 5,478,925, which is herein incorporated by reference in its entirety). Additionally, multimers of the invention may be generated using techniques known in the art to form one or more inter-molecule cross-links between the cysteine residues located within the sequence of the polypeptides desired to be contained in the multimer (see, e.g., U.S. Pat. No. 5,478,925, which is herein incorporated by reference in its entirety). Further, polypeptides of the invention may be routinely modified by the addition of cysteine or biotin to the C-terminus or N-terminus of the polypeptide and techniques known in the art may be applied to generate multimers containing one or more of these modified polypeptides (see, e.g., U.S. Pat. No. 5,478,925, which is herein incorporated by reference in its entirety). Additionally, techniques known in the art may be applied to generate liposomes containing the polypeptide components desired to be contained in the multimer of the invention (see, e.g., U.S. Pat. No. 5,478,925, which is herein incorporated by reference in its entirety).

[0223] Alternatively, multimers of the invention may be generated using genetic engineering techniques known in the art. In one embodiment, polypeptides contained in multimers of the invention are produced recombinantly using fusion protein technology described herein or otherwise known in the art (see, e.g., U.S. Pat. No. 5,478,925, which is herein incorporated by reference in its entirety). In a specific embodiment, polynucleotides coding for a homodimer of the invention are generated by ligating a polynucleotide sequence encoding a polypeptide of the invention to a sequence encoding a linker polypeptide and then further to a synthetic polynucleotide encoding the translated product of the polypeptide in the reverse orientation from the original C-terminus to the N-terminus (lacking the leader sequence) (see, e.g., U.S Pat. No. 5,478,925, which is herein incorporated by reference in its entirety). In another embodiment, recombinant techniques described herein or otherwise known in the art are applied to generate recombinant polypeptides of the invention which contain a transmembrane domain (or hydrophobic or signal peptide) and which can be incorporated by membrane reconstitution techniques into liposomes (see, e.g., U.S. Pat. No. 5,478,925, which is herein incorporated by reference in its entirety).

[0224] Antibodies

[0225] Further polypeptides of the invention relate to antibodies and T-cell antigen receptors (TCR) which immunospecifically bind a polypeptide, polypeptide fragment, or variant of the invention (e.g., a polypeptide or fragment or variant of the amino acid sequence of SEQ ID NO:Y or a polypeptide encoded by the cDNA contained in Clone ID NO:Z, and/or an epitope, of the present invention) as determined by immunoassays well known in the art for assaying specific antibody-antigen binding. Antibodies of the invention include, but are not limited to, polyclonal, monoclonal, multispecific, human, humanized or chimeric antibodies, single chain antibodies, Fab fragments, F(ab′) fragments, fragments produced by a Fab expression library, anti-idiotypic (anti-Id) antibodies (including, e.g., anti-Id antibodies to antibodies of the invention), intracellularly-made antibodies (i.e., intrabodies), and epitope-binding fragments of any of the above. The term “antibody,” as used herein, refers to immunoglobulin molecules and immunologically active portions of immunoglobulin molecules, i.e., molecules that contain an antigen binding site that immunospecifically binds an antigen. The immunoglobulin molecules of the invention can be of any type (e.g., IgG, IgE, IgM, IgD, IgA and IgY), class (e.g., IgG1, IgG2, IgG3, IgG4, IgA1 and IgA2) or subclass of immunoglobulin molecule. In preferred embodiments, the immunoglobulin molecules of the invention are IgG1. In other preferred embodiments, the immunoglobulin molecules of the invention are IgG4.

[0226] Most preferably the antibodies are human antigen-binding antibody fragments of the present invention and include, but are not limited to, Fab, Fab′ and F(ab′)2, Fd, single-chain Fvs (scFv), single-chain antibodies, disulfide-linked Fvs (sdFv) and fragments comprising either a VL or VH domain. Antigen-binding antibody fragments, including single-chain antibodies, may comprise the variable region(s) alone or in combination with the entirety or a portion of the following: hinge region, CH1, CH2, and CH3 domains. Also included in the invention are antigen-binding fragments also comprising any combination of variable region(s) with a hinge region, CH1, CH2, and CH3 domains. The antibodies of the invention may be from any animal origin including birds and mammals. Preferably, the antibodies are human, murine (e.g., mouse and rat), donkey, ship rabbit, goat, guinea pig, camel, horse, or chicken. As used herein, “human” antibodies include antibodies having the amino acid sequence of a human immunoglobulin and include antibodies isolated from human immunoglobulin libraries or from animals transgenic for one or more human immunoglobulin and that do not express endogenous immunoglobulins, as described infra and, for example in, U.S. Pat. No. 5,939,598 by Kucherlapati et al.

[0227] The antibodies of the present invention may be monospecific, bispecific, trispecific or of greater multispecificity. Multispecific antibodies may be specific for different epitopes of a polypeptide of the present invention or may be specific for both a polypeptide of the present invention as well as for a heterologous epitope, such as a heterologous polypeptide or solid support material. See, e.g., PCT publications WO 93/17715; WO 92/08802; WO 91/00360; WO 92/05793; Tutt, et al., J. Immunol. 147:60-69 (1991); U.S. Pat. Nos. 4,474,893; 4,714,681; 4,925,648; 5,573,920; 5,601,819; Kostelny et al., J. Immunol. 148:1547-1553 (1992).

[0228] Antibodies of the present invention may be described or specified in terms of the epitope(s) or portion(s) of a polypeptide of the present invention which they recognize or specifically bind. The epitope(s) or polypeptide portion(s) may be specified as described herein, e.g., by N-terminal and C-terminal positions, or by size in contiguous amino acid residues, or listed in the Tables and Figures. Preferred epitopes of the invention include those shown in column 6 of Table 1A, as well as polynucleotides that encode these epitopes. Antibodies, which specifically bind any epitope or polypeptide of the present invention may also be excluded. Therefore, the present invention includes antibodies that specifically bind polypeptides of the present invention, and allows for the exclusion of the same.

[0229] Antibodies of the present invention may also be described or specified in terms of their cross-reactivity. Antibodies that do not bind any other analog, ortholog, or homolog of a polypeptide of the present invention are included. Antibodies that bind polypeptides with at least 95%, at least 90%, at least 85%, at least 80%, at least 75%, at least 70%, at least 65%, at least 60%, at least 55%, and at least 50% identity (as calculated using methods known in the art and described herein) to a polypeptide of the present invention are also included in the present invention. In specific embodiments, antibodies of the present invention cross-react with murine, rat and/or rabbit homologs of human proteins and the corresponding epitopes thereof. Antibodies that do not bind polypeptides with less than 95%, less than 90%, less than 85%, less than 80%, less than 75%, less than 70%, less than 65%, less than 60%, less than 55%, and less than 50% identity (as calculated using methods known in the art and described herein) to a polypeptide of the present invention are also included in the present invention. In a specific embodiment, the above-described cross-reactivity is with respect to any single specific antigenic or immunogenic polypeptide, or combination(s) of 2, 3, 4, 5, or more of the specific antigenic and/or immunogenic polypeptides disclosed herein. Further included in the present invention are antibodies which bind polypeptides encoded by polynucleotides which hybridize to a polynucleotide of the present invention under stringent hybridization conditions (as described herein). Antibodies of the present invention may also be described or specified in terms of their binding affinity to a polypeptide of the invention. Preferred binding affinities include those with a dissociation constant or Kd less than 5×10⁻² M, 10⁻² M, 5×10⁻³ M, 10⁻³ M, 5×10⁻⁴ M,10⁻⁴ M, 5×10⁻⁵ M, 10⁻⁵ M, 5×10⁻⁶ M, 10−6M, 5×10⁻⁷ M, 10⁷ M, 5×10⁻⁸ M, 10⁻⁸ M, 5×10⁻⁹ M, 5×10⁻¹⁰ M, 10⁻¹⁰ M, 5×10⁻¹¹ M, 10⁻¹¹ M, 5×10⁻¹² M, 10⁻¹² M, 5×10⁻¹³ M, 10⁻¹³ M, 5×10⁻¹⁴ M, 10⁻¹⁴ M, 5×10⁻¹⁵ M, or 10⁻¹⁵ M.

[0230] The invention also provides antibodies that competitively inhibit binding of an antibody to an epitope of the invention as determined by any method known in the art for determining competitive binding, for example, the immunoassays described herei-n. In preferred embodiments, the antibody competitively inhibits binding to the epitope by at least 95%, at least 90%, at least 85 %, at least 80%, at least 75%, at least 70%, at least 60%, or at least 50%.

[0231] Antibodies of the present invention may act as agonists or antagonists of the polypeptides of the present invention. For example, the present invention includes antibodies which disrupt the receptor/ligand interactions with the polypeptides of the invention either partially or fully. Preferably, antibodies of the present invention bind an antigenic epitope disclosed herein, or a portion thereof. The invention features both receptor-specific antibodies and ligand-specific antibodies. The invention also features receptor-specific antibodies, which do not prevent ligand binding but prevent receptor activation. Receptor activation (i.e., signaling) may be determined by techniques described herein or otherwise known in the art. For example, receptor activation can be determined by detecting the phosphorylation (e.g., tyrosine or serine/threonine) of the receptor or its substrate by immunoprecipitation followed by western blot analysis (for example, as described supra). In specific embodiments, antibodies are provided that inhibit ligand activity or receptor activity by at least 95%, at least 90%, at least 85%, at least 80%, at least 75%, at least 70%, at least 60%, or at least 50% of the activity in absence of the antibody.

[0232] The invention also features receptor-specific antibodies which both prevent ligand binding and receptor activation as well as antibodies that recognize the receptor-ligand complex, and, preferably, do not specifically recognize the unbound receptor or the unbound ligand. Likewise, included in the invention are neutralizing antibodies which bind the ligand and prevent binding of the ligand to the receptor, as well as antibodies which bind the ligand, thereby preventing receptor activation, but do not prevent the ligand from binding the receptor. Further included in the invention are antibodies, which activate the receptor. These antibodies may act as receptor agonists, i.e., potentiate or activate either all or a subset of the biological activities of the ligand-mediated receptor activation, for example, by inducing dimerization of the receptor. The antibodies may be specified as agonists, antagonists or inverse agonists for biological activities comprising the specific biological activities of the peptides of the invention disclosed herein. The above antibody agonists can be made using methods known in the art. See, e.g., PCT publication WO 96/40281; U.S. Pat. No. 5,811,097; Deng et al., Blood 92(6):1981-1988 (1998); Chen et al., Cancer Res. 58(16):3668-3678 (1998); Harrop et al., J. Immunol. 161(4):1786-1794 (1998); Zhu et al., Cancer Res. 58(15):3209-3214 (1998); Yoon et al., J. Immunol. 160(7):3170-3179 (1998); Prat et al., J. Cell. Sci. 111(Pt2):237-247 (1998); Pitard et al., J. Immunol. Methods 205(2):177-190 (1997); Liautard et al., Cytokine 9(4):233-241 (1997); Carlson et al., J. Biol. Chem. 272(17):11295-11301 (1997); Taryman et al., Neuron 14(4):755-762 (1995); Muller et al., Structure 6(9):1153-1167 (1998); Bartunek et a Cytokine 8(l):14-20 (1996) (which are all incorporated by reference herein in their entireties).

[0233] Antibodies of the present invention may be used, for example, to purify, detect, and target the polypeptides of the present invention, including both in vitro and in vivo diagnostic and therapeutic methods. For example, the antibodies have utility in immunoassays for qualitatively and quantitatively measuring levels of the polypeptides of the present invention in biological samples. See, e.g., Harlow et al., Antibodies: A Laboratory Manual, (Cold Spring Harbor Laboratory Press, 2nd ed. 1988); incorporated by reference herein in its entirety.

[0234] As discussed in more detail below, the antibodies of the present invention may be used either alone or in combination with other compositions. The antibodies may further be recombinantly fused to a heterologous polypeptide at the N- or C-terminus or chemically conjugated (including covalent and non-covalent conjugations) to polypeptides or other compositions. For example, antibodies of the present invention may be recombinantly fused or conjugated to molecules useful as labels in detection assays and effector molecules such as heterologous polypeptides, drugs, radionuclides, or toxins. See, e.g., PCT publications WO 92/08495; WO 91/14438; WO 89/12624; U.S. Pat. No. 5,314,995; and EP 396,387; the disclosures of which are incorporated herein by reference in their entireties.

[0235] The antibodies of the invention include derivatives that are modified, i.e., by the covalent attachment of any type of molecule to the antibody such that covalent attachment does not prevent the antibody from generating an anti-idiotypic response. For example, but not by way of limitation, the antibody derivatives include antibodies that have been modified, e.g., by glycosylation, acetylation, pegylation, phosphylation, amidation, derivatization by known protecting/blocking groups, proteolytic cleavage, linkage to a cellular ligand or other protein, etc. Any of numerous chemical modifications may be carried out by known techniques, including, but not limited to specific chemical cleavage, acetylation, formylation, metabolic synthesis of tunicamycin, etc. Additionally, the derivative may contain one or more non-classical amino acids.

[0236] The antibodies of the present invention may be generated by any suitable method known in the art. Polyclonal antibodies to an antigen-of-interest can be produced by various procedures well known in the art. For example, a polypeptide of the invention can be administered to various host animals including, but not limited to, rabbits, mice, rats, etc. to induce the production of sera containing polyclonal antibodies specific for the antigen. Various adjuvants may be used to increase the immunological response, depending on the host species, and include but are not limited to, Freund's (complete and incomplete), mineral gels such as aluminum hydroxide, surface active substances such as lysolecithin, pluronic polyols, polyanions, peptides, oil emulsions, keyhole limpet hemocyanins, dinitrophenol, and potentially useful human adjuvants such as BCG (bacille Calmette-Guerin) and corynebacterium parvum. Such adjuvants are also well known in the art.

[0237] Monoclonal antibodies can be prepared using a wide variety of techniques known in the art including the use of hybridoma, recombinant, and phage display technologies, or a combination thereof. For example, monoclonal antibodies can be produced using hybridoma techniques including those known in the art and taught, for example, in Harlow et al., Antibodies: A Laboratory Manual, (Cold Spring Harbor Laboratory Press, 2nd ed. 1988); Hammerling, et al., in: Monoclonal Antibodies and T-Cell Hybridomas 563-681 (Elsevier, N.Y., 1981) (said references incorporated by reference in their entireties). The term “monoclonal antibody” as used herein is not limited to antibodies produced through hybridoma technology. The term “monoclonal antibody” refers to an antibody that is derived from a single clone, including any eukaryotic, prokaryotic, or phage clone, and not the method by which it is produced.

[0238] Methods for producing and screening for specific antibodies using hybridoma technology are routine and well known in the art and are discussed in detail in the Examples. In a non-limiting example, mice can be immunized with a polypeptide of the invention or a cell expressing such peptide. Once an immune response is detected, e.g., antibodies specific for the antigen are detected in the mouse serum, the mouse spleen is harvested and splenocytes isolated. The splenocytes are then fused by well known techniques to any suitable myeloma cells, for example cells from cell line SP20 available from the ATCC. Hybridomas are selected and cloned by limited dilution. The hybridoma clones are then assayed by methods known in the art for cells that secrete antibodies capable of binding a polypeptide of the invention. Ascites fluid, which generally contains high levels of antibodies, can be generated by immunizing mice with positive hybridoma clones.

[0239] Accordingly, the present invention provides methods of generating monoclonal antibodies as well as antibodies produced by the method comprising culturing a hybridoma cell secreting an antibody of the invention wherein, preferably, the hybridoma is generated by fusing splenocytes isolated from a mouse immunized with an antigen of the invention with myeloma cells and then screening the hybridomas resulting from the fusion for hybridoma clones that secrete an antibody able to bind a polypeptide of the invention.

[0240] Another well known method for producing both polyclonal and monoclonal human B cell lines is transformation using Epstein Barr Virus (EBV). Protocols for generating EBV-transformed B cell lines are commonly known in the art, such as, for example, the protocol outlined in Chapter 7.22 of Current Protocols in Immunology, Coligan et al., Eds., 1994, John Wiley & Sons, NY, which is hereby incorporated in its entirety by reference herein. The source of B cells for transformation is commonly human peripheral blood, but B cells for transformation may also be derived from other sources including, but not limited to, lymph nodes, tonsil, spleen, tumor tissue, and infected tissues. Tissues are generally made into single cell suspensions prior to EBV transformation. Additionally, steps may be taken to either physically remove or inactivate T cells (e.g., by treatment with cyclosporin A) in B cell-containing samples, because T cells from individuals seropositive for anti-EBV antibodies can suppress B cell immortalization by EBV.

[0241] In general, the sample containing human B cells is innoculated with EBV, and cultured for 3-4 weeks. A typical source of EBV is the culture supernatant of the B95-8 cell line (ATCC #VR-1492). Physical signs of EBV transformation can generally be seen towards the end of the 3-4 week culture period. By phase-contrast microscopy, transformed cells may appear large, clear, hairy and tend to aggregate in tight clusters of cells. Initially, EBV lines are generally polyclonal. However, over prolonged periods of cell cultures, EBV lines may become monoclonal or polyclonal as a result of the selective outgrowth of particular B cell clones. Alternatively, polyclonal EBV transformed lines may be subcloned (e.g., by limiting dilution culture) or fused with a suitable fusion partner and plated at limiting dilution to obtain monoclonal B cell lines. Suitable fusion partners for EBV transformed cell lines include mouse myeloma cell lines (e.g., SP2/0, X63-Ag8.653), heteromyeloma cell lines (human×mouse; e.g, SPAM-8, SBC-H20, and CB-F7), and human cell lines (e.g., GM 1500, SKO-007, RPMI 8226, and KR-4). Thus, the present invention also provides a method of generating polyclonal or monoclonal human antibodies against polypeptides of the invention or fragments thereof, comprising EBV-transformation of human B cells.

[0242] Antibody fragments, which recognize specific epitopes may be generated by known techniques. For example, Fab and F(ab′)2 fragments of the invention may be produced by proteolytic cleavage of immunoglobulin molecules, using enzymes such as papain (to produce Fab fragments) or pepsin (to produce F(ab′)2 fragments). F(ab′)2 fragments contain the variable region, the light chain constant region and the CH1 domain of the heavy chain. For example, the antibodies of the present invention can also be generated using various phage display methods known in the art and as discussed in detail in the Examples (e.g., Example 10). In phage display methods, functional antibody domains are displayed on the surface of phage particles, which carry the polynucleotide sequences encoding them. In a particular embodiment, such phage can be utilized to display antigen binding domains expressed from a repertoire or combinatorial antibody library (e.g., human or murine). Phage expressing an antigen binding domain that binds the antigen of interest can be selected or identified with antigen, e.g., using labeled antigen or antigen bound or captured to a solid surface or bead. Phage used in these methods are typically filamentous phage including fd and M13 binding domains expressed from phage with Fab, Fv or disulfide stabilized Fv antibody domains recombinantly fused to either the phage gene III or gene VIII protein. Examples of phage display methods that can be used to make the antibodies of the present invention include those disclosed in Brinkman et al., J. Immunol. Methods 182:41-50 (1995); Ames et al., J. Immunol. Methods 184:177-186 (1995); Kettleborough et al., Eur. J. Immunol. 24:952-958 (1994); Persic et al., Gene 187 9-18 (1997); Burton et al., Advances in Immunology 57:191-280 (1994); PCT application No. PCT/GB91/01134; PCT publications WO 90/02809; WO 91/10737; WO 92/01047; WO 92/18619; WO 93/11236; WO 95/15982; WO 95/20401; and U.S. Pat. Nos. 5,698,426; 5,223,409; 5,403,484; 5,580,717; 5,427,908; 5,750,753; 5,821,047; 5,571,698; 5,427,908; 5,516,637; 5,780,225; 5,658,727; 5,733,743 and 5,969,108; each of which is incorporated herein by reference in its entirety.

[0243] As described in the above references, after phage selection, the antibody coding regions from the phage can be isolated and used to generate whole antibodies, including human antibodies, or any other desired antigen binding fragment, and expressed in any desired host, including mammalian cells, insect cells, plant cells, yeast, and bacteria, e.g., as described in detail below. For example, techniques to recombinantly produce Fab, Fab′ and F(ab′)2 fragments can also be employed using methods known in the art such as those disclosed in PCT publication WO 92/22324; Mullinax et al., BioTechniques 12(6):864-869 (1992); and Sawai et al., AJRI 34:26-34 (1995); and Better et al., Science 240:1041-1043 (1988) (said references incorporated by reference in their entireties).

[0244] Examples of techniques which can be used to produce single-chain Fvs and antibodies include those described in U.S. Pat. Nos. 4,946,778 and 5,258,498; Huston et al., Methods in Enzymology 203:46-88 (1991); Shu et al., PNAS 90:7995-7999 (1993); and Skerra et al., Science 240:1038-1040 (1988). For some uses, including in vivo use of antibodies in humans and in vitro detection assays, it may be preferable to use chimeric, humanized, or human antibodies. A chimeric antibody is a molecule in which different portions of the antibody are derived from different animal species, such as antibodies having a variable region derived from a murine monoclonal antibody and a human immunoglobulin constant region. Methods for producing chimeric antibodies are known in the art. See e.g., Morrison, Science 229:1202 (1985); Oi et al., BioTechniques 4:214 (1986); Gillies et al., (1989) J. Immunol. Methods 125:191-202; U.S. Pat. Nos. 5,807,715; 4,816,567; and 4,816397, which are incorporated herein by reference in their entirety. Humanized antibodies are antibody molecules from non-human species antibody that binds the desired antigen having one or more complementarity determining regions (CDRs) from the non-human species and a framework regions from a human immunoglobulin molecule. Often, framework residues in the human framework regions will be substituted with the corresponding residue from the CDR donor antibody to alter, preferably improve, antigen binding. These framework substitutions are identified by methods well known in the art, e.g., by modeling of the interactions of the CDR and framework residues to identify framework residues important for antigen binding and sequence comparison to identify unusual framework residues at particular positions. (See, e.g., Queen et al., U.S. Pat. No. 5,585,089; Riechmann et al., Nature 332:323 (1988), which are incorporated herein by reference in their entireties.) Antibodies can be humanized using a variety of techniques known in the art including, for example, CDR-grafting (EP 239,400; PCT publication WO 91/09967; U.S. Pat. Nos. 5,225,539; 5,530,101; and 5,585,089), veneering or resurfacing (EP 592,106; EP 519,596; Padlan, Molecular Immunology 28(4/5):489-498 (1991); Studnicka et al., Protein Engineering 7(6):805-814 (1994); Roguska. et al., PNAS 91:969-973 (1994)), and chain shuffling (U.S. Pat. No. 5,565,332).

[0245] Completely human antibodies are particularly desirable for therapeutic treatment of human patients. Human antibodies can be made by a variety of methods known in the art including phage display methods described above using antibody libraries derived from human immunoglobulin sequences. See also, U.S. Pat. Nos. 4,444,887 and 4,716,111; and PCT publications WO 98/46645, WO 98/50433, WO 98/24893, WO 98/16654, WO 96/34096, WO 96/33735, and WO 91/10741; each of which is incorporated herein by reference in its entirety.

[0246] Human antibodies can also be produced using transgenic mice which are incapable of expressing functional endogenous immunoglobulins, but which can express human immunoglobulin genes. For example, the human heavy and light chain immunoglobulin gene complexes may be introduced randomly or by homologous recombination into mouse embryonic stem cells. Alternatively, the human variable region, constant region, and diversity region may be introduced into mouse embryonic stem cells in addition to the human heavy and light chain genes. The mouse heavy and light chain immunoglobulin genes may be rendered non-functional separately or simultaneously with the introduction of human immunoglobulin loci by homologous recombination. In particular, homozygous deletion of the JH region prevents endogenous antibody production. The modified embryonic stem cells are expanded and microinjected into blastocysts to produce chimeric mice. The chimeric mice are then bred to produce homozygous offspring, which express human antibodies. The transgenic mice are immunized in the normal fashion with a selected antigen, e.g., all or a portion of a polypeptide of the invention. Monoclonal antibodies directed against the antigen can be obtained from the immunized, transgenic mice using conventional hybridoma technology. The human immunoglobulin transgenes harbored by the transgenic mice rearrange during B cell differentiation, and subsequently undergo class switching and somatic mutation. Thus, using such a technique, it is possible to produce therapeutically useful IgG, IgA, IgM and IgE antibodies. For an overview of this technology for producing human antibodies, see Lonberg and Huszar, Int. Rev. Immunol. 13:65-93 (1995). For a detailed discussion of this technology for producing human antibodies and human monoclonal antibodies and protocols for producing such antibodies, see, e.g., PCT publications WO 98/24893; WO 92/01047; WO 96/34096; WO 96/33735; European Patent No. 0 598 877; U.S. Pat. Nos. 5,413,923; 5,625,126; 5,633,425; 5,569,825; 5,661,016; 5,545,806; 5,814,318; 5,885,793; 5,916,771; 5,939,598; 6,075,181 and 6,114,598, which are incorporated by reference herein in their entirety. In addition, companies such as Abgenix, Inc. (Freemont, Calif.) and Genpharm (San Jose, Calif.) can be engaged to provide human antibodies directed against a selected antigen using technology similar to that described above.

[0247] Completely human antibodies which recognize a selected epitope can be generated using a technique referred to as “guided selection.” In this approach a selected non-human monoclonal antibody, e.g., a mouse antibody, is used to guide the selection of a completely human antibody recognizing the same epitope. (Jespers et al., Bio/technology 12:899-903 (1988)).

[0248] Further, antibodies to the polypeptides of the invention can, in turn, be utilized to generate anti-idiotype antibodies that “mimic” polypeptides of the invention using techniques well known to those skilled in the art. (See, e.g., Greenspan & Bona, FASEB J. 7(5):437-444; (1989) and Nissinoff, J. Immunol. 147(8):2429-2438 (1991)). For example, antibodies which bind to and competitively inhibit polypeptide multimerization and/or binding of a polypeptide of the invention to a ligand can be used to generate anti-idiotypes that “mimic” the polypeptide multimerization and/or binding domain and, as a consequence, bind to and neutralize polypeptide and/or its ligand. Such neutralizing anti-idiotypes or Fab fragments of such anti-idiotypes can be used in therapeutic regimens to neutralize polypeptide ligand/receptor. For example, such anti-idiotypic antibodies can be used to bind a polypeptide of the invention and/or to bind its ligand(s)/receptor(s), and thereby block its biological activity. Alternatively, antibodies which bind to and enhance polypeptide multimerization and/or binding, and/or receptor/ligand multimerization, binding and/or signaling can be used to generate anti-idiotypes that function as agonists of a polypeptide of the invention and/or its ligand/receptor. Such agonistic anti-idiotypes or Fab fragments of such anti-idiotypes can be used in therapeutic regimens as agonists of the polypeptides of the invention or its ligand(s)/receptor(s). For example, such anti-idiotypic antibodies can be used to bind a polypeptide of the invention and/or to bind its ligand(s)/receptor(s), and thereby promote or enhance its biological activity.

[0249] Intrabodies of the invention can be produced using methods known in the art, such as those disclosed and reviewed in Chen et al., Hum. Gene Ther. 5:595-601 (1994); Marasco, W. A., Gene Ther. 4:11-15 (1997); Rondon and Marasco, Annu. Rev. Microbiol. 51:257-283 (1997); Proba et al., J. Mol. Biol. 275:245-253 (1998); Cohen et al., Oncogene 17:2445-2456 (1998); Ohage and Steipe, J. Mol. Biol. 291:1119-1128 (1999); Ohage et al., J. Mol. Biol. 291:1129-1134 (1999); Wirtz and Steipe, Protein Sci. 8:2245-2250 (1999); Zhu et al., J. Immunol. Methods 231:207-222 (1999); and references cited therein.

[0250] Polynucleotides Encoding Antibodies

[0251] The invention further provides polynucleotides comprising a nucleotide sequence encoding an antibody of the invention and fragments thereof. The invention also encompasses polynucleotides that hybridize under stringent or alternatively, under lower stringency hybridization conditions, e.g., as defined supra, to polynucleotides that encode an antibody, preferably, that specifically binds to a polypeptide of the invention, preferably, an antibody that binds to a polypeptide having the amino acid sequence of SEQ ID NO:Y, to a polypeptide encoded by a portion of SEQ ID NO:X as defined in columns 8 and 9 of Table 2, and/or to a polypeptide encoded by the cDNA contained in Clone ID NO:Z.

[0252] The polynucleotides may be obtained, and the nucleotide sequence of the polynucleotides determined, by any method known in the art. For example, if the nucleotide sequence of the antibody is known, a polynucleotide encoding the antibody may be assembled from chemically synthesized oligonucleotides (e.g., as described in Kutmeier et al., BioTechniques 17:242 (1994)), which, briefly, involves the synthesis of overlapping oligonucleotides containing portions of the sequence encoding the antibody, annealing and ligating of those oligonucleotides, and then amplification of the ligated oligonucleotides by PCR.

[0253] Alternatively, a polynucleotide encoding an antibody may be generated from nucleic acid from a suitable source. If a clone containing a nucleic acid encoding a particular antibody is not available, but the sequence of the antibody molecule is known, a nucleic acid encoding the immunoglobulin may be chemically synthesized or obtained from a suitable source (e.g., an antibody cDNA library, or a cDNA library generated from, or nucleic acid, preferably poly A+ RNA, isolated from, any tissue or cells expressing the antibody, such as hybridoma cells selected to express an antibody of the invention) by PCR amplification using synthetic primers hybridizable to the 3′ and 5′ ends of the sequence or by cloning using an oligonucleotide probe specific for the particular gene sequence to identify, e.g., a cDNA clone from a cDNA library that encodes the antibody. Amplified nucleic acids generated by PCR may then be cloned into replicable cloning vectors using any method well known in the art.

[0254] Once the nucleotide sequence and corresponding amino acid sequence of the antibody is determined, the nucleotide sequence of the antibody may be manipulated using methods well known in the art for the manipulation of nucleotide sequences, e.g., recombinant DNA techniques, site directed mutagenesis, PCR, etc. (see, for example, the techniques described in Sambrook et al., 1990, Molecular Cloning, A Laboratory Manual, 2d Ed., Cold Spring Harbor Laboratory, Cold Spring Harbor, N.Y. and Ausubel et al., eds., 1998, Current Protocols in Molecular Biology, John Wiley & Sons, NY, which are both incorporated by reference herein in their entireties ), to generate antibodies having a different amino acid sequence, for example to create amino acid substitutions, deletions, and/or insertions.

[0255] In a specific embodiment, the amino acid sequence of the heavy and/or light chain variable domains may be inspected to identify the sequences of the complementarity determining regions (CDRs) by methods that are well know in the art, e.g., by comparison to known amino acid sequences of other heavy and light chain variable regions to determine the regions of sequence hypervariability. Using routine recombinant DNA techniques, one or more of the CDRs may be inserted within framework regions, e.g., into human framework regions to humanize a non-human antibody, as described supra. The framework regions may be naturally occurring or consensus framework regions, and preferably human framework regions (see, e.g., Chothia et al., J. Mol. Biol. 278: 457-479 (1998) for a listing of human framework regions). Preferably, the polynucleotide generated by the combination of the framework regions and CDRs encodes an antibody that specifically binds a polypeptide of the invention. Preferably, as discussed supra, one or more amino acid substitutions may be made within the framework regions, and, preferably, the amino acid substitutions improve binding of the antibody to its antigen. Additionally, such methods may be used to make amino acid substitutions or deletions of one or more variable region cysteine residues participating in an intrachain disulfide bond to generate antibody molecules lacking one or more intrachain disulfide bonds. Other alterations to the polynucleotide are encompassed by the present invention and within the skill of the art.

[0256] In addition, techniques developed for the production of “chimeric antibodies” (Morrison et al., Proc. Natl. Acad. Sci. 81:851-855 (1984); Neuberger et al., Nature 312:604-608 (1984); Takeda et al., Nature 314:452-454 (1985)) by splicing genes from a mouse antibody molecule of appropriate antigen specificity together with genes from a human antibody molecule of appropriate biological activity can be used. As described supra, a chimeric antibody is a molecule in which different portions are derived from different animal species, such as those having a variable region derived from a murine mAb and a human immunoglobulin constant region, e.g., humanized antibodies.

[0257] Alternatively, techniques described for the production of single chain antibodies (U.S. Pat. No. 4,946,778; Bird, Science 242:423- 42 (1988); Huston et al., Proc. Natl. Acad. Sci. USA 85:5879-5883 (1988); and Ward et al., Nature 334:544-54 (1989)) can be adapted to produce single chain antibodies. Single chain antibodies are formed by linking the heavy and light chain fragments of the Fv region via an amino acid bridge, resulting in a single chain polypeptide. Techniques for the assembly of functional Fv fragments in E. coli may also be used (Skerra et al., Science 242:1038- 1041 (1988)).

[0258] Methods of Producing Antibodies

[0259] The antibodies of the invention can be produced by any method known in the art for the synthesis of antibodies, in particular, by chemical synthesis or preferably, by recombinant expression techniques. Methods of producing antibodies include, but are not limited to, hybridoma technology, EBV transformation, and other methods discussed herein as well as through the use recombinant DNA technology, as discussed below.

[0260] Recombinant expression of an antibody of the invention, or fragment, derivative or analog thereof, (e.g., a heavy or light chain of an antibody of the invention or a single chain antibody of the invention), requires construction of an expression vector containing a polynucleotide that encodes the antibody. Once a polynucleotide encoding an antibody molecule or a heavy or light chain of an antibody, or portion thereof (preferably containing the heavy or light chain variable domain), of the invention has been obtained, the vector for the production of the antibody molecule may be produced by recombinant DNA technology using techniques well known in the art. Thus, methods for preparing a protein by expressing a polynucleotide containing an antibody encoding nucleotide sequence are described herein. Methods which are well known to those skilled in the art can be used to construct expression vectors containing antibody coding sequences and appropriate transcriptional and translational control signals. These methods include, for example, in vitro recombinant DNA techniques, synthetic techniques, and in vivo genetic recombination. The invention, thus, provides replicable vectors comprising a nucleotide sequence encoding an antibody molecule of the invention, or a heavy or light chain thereof, or a heavy or light chain variable domain, operably linked to a promoter. Such vectors may include the nucleotide sequence encoding the constant region of the antibody molecule (see, e.g., PCT Publication WO 86/05807; PCT Publication WO 89/01036; and U.S. Pat. No. 5,122,464) and the variable domain of the antibody may be cloned into such a vector for expression of the entire heavy or light chain.

[0261] The expression vector is transferred to a host cell by conventional techniques and the transfected cells are then cultured by conventional techniques to produce an antibody of the invention. Thus, the invention includes host cells containing a polynucleotide encoding an antibody of the invention, or a heavy or light chain thereof, or a single chain antibody of the invention, operably linked to a heterologous promoter. In preferred embodiments for the expression of double-chained antibodies, vectors encoding both the heavy and light chains may be co-expressed in the host cell for expression of the entire immunoglobulin molecule, as detailed below.

[0262] A variety of host-expression vector systems may be utilized to express the antibody molecules of the invention. Such host-expression systems represent vehicles by which the coding sequences of interest may be produced and subsequently purified, but also represent cells which may, when transformed or transfected with the appropriate nucleotide coding sequences, express an antibody molecule of the invention in situ. These include but are not limited to microorganisms such as bacteria (e.g., E. coli, B. subtilis) transformed with recombinant bacteriophage DNA, plasmid DNA or cosmid DNA expression vectors containing antibody coding sequences; yeast (e.g., Saccharomyces, Pichia) transformed with recombinant yeast expression vectors containing antibody coding sequences; insect cell systems infected with recombinant virus expression vectors (e.g., baculovirus) containing antibody coding sequences; plant cell systems infected with recombinant virus expression vectors (e.g., cauliflower mosaic virus, CaMV; tobacco mosaic virus, TMV) or transformed with recombinant plasmid expression vectors (e.g., Ti plasmid) containing antibody coding sequences; or mammalian cell systems (e.g., COS, CHO, BHK, 293, 3T3 cells) harboring recombinant expression constructs containing promoters derived from the genome of mammalian cells (e.g., metallothionein promoter) or from mammalian viruses (e.g., the adenovirus late promoter; the vaccinia virus 7.5K promoter). Preferably, bacterial cells such as Escherichia coli, and more preferably, eukaryotic cells, especially for the expression of whole recombinant antibody molecule, are used for the expression of a recombinant antibody molecule. For example, mammalian cells such as Chinese hamster ovary cells (CHO), in conjunction with a vector such as the major intermediate early gene promoter element from human cytomegalovirus is an effective expression system for antibodies (Foecking et al., Gene 45:101 (1986); Cockett et al., Bio/Technology 8:2 (1990)).

[0263] In bacterial systems, a number of expression vectors may be advantageously selected depending upon the use intended for the antibody molecule being expressed. For example, when a large quantity of such a protein is to be produced, for the generation of pharmaceutical compositions of an antibody molecule, vectors which direct the expression of high levels of fusion protein products that are readily purified may be desirable. Such vectors include, but are not limited, to the E. coli expression vector pUR278 (Ruther et al., EMBO J. 2:1791 (1983)), in which the antibody coding sequence may be ligated individually into the vector in frame with the lac Z coding region so that a fusion protein is produced; pIN vectors (Inouye & Inouye, Nucleic Acids Res. 13:3101-3109 (1985); Van Heeke & Schuster, J. Biol. Chem. 24:5503-5509 (1989)); and the like. pGEX vectors may also be used to express foreign polypeptides as fusion proteins with glutathione S-transferase (GST). In general, such fusion proteins are soluble and can easily be purified from lysed cells by adsorption and binding to matrix glutathione-agarose beads followed by elution in the presence of free glutathione. The pGEX vectors are designed to include thrombin or factor Xa protease cleavage sites so that the cloned target gene product can be released from the GST moiety.

[0264] In an insect system, Autographa californica nuclear polyhedrosis virus (AcNPV) is used as a vector to express foreign genes. The virus grows in Spodoptera frugiperda cells. The antibody coding sequence may be cloned individually into non-essential regions (for example the polyhedrin gene) of the virus and placed under control of an AcNPV promoter (for example the polyhedrin promoter).

[0265] In mammalian host cells, a number of viral-based expression systems may be utilized. In cases where an adenovirus is used as an expression vector, the antibody coding sequence of interest may be ligated to an adenovirus transcription/translation control complex, e.g., the late promoter and tripartite leader sequence. This chimeric gene may then be inserted in the adenovirus genome by in vitro or in vivo recombination. Insertion in a non-essential region of the viral genome (e.g., region E1 or E3) will result in a recombinant virus that is viable and capable of expressing the antibody molecule in infected hosts. (e.g., see Logan & Shenk, Proc. Natl. Acad. Sci. USA 81:355-359 (1984)). Specific initiation signals may also be required for efficient translation of inserted antibody coding sequences. These signals include the ATG initiation codon and adjacent sequences. Furthermore, the initiation codon must be in phase with the reading frame of the desired coding sequence to ensure translation of the entire insert. These exogenous translational control signals and initiation codons can be of a variety of origins, both natural and synthetic. The efficiency of expression may be enhanced by the inclusion of appropriate transcription enhancer elements, transcription terminators, etc. (see Bittner et al., Methods in Enzymol. 153:51-544 (1987)).

[0266] In addition, a host cell strain may be chosen which modulates the expression of the inserted sequences, or modifies and processes the gene product in the specific fashion desired. Such modifications (e.g., glycosylation) and processing (e.g., cleavage) of protein products may be important for the function of the protein. Different host cells have characteristic and specific mechanisms for the post-translational processing and modification of proteins and gene products. Appropriate cell lines or host systems can be chosen to ensure the correct modification and processing of the foreign protein expressed. To this end, eukaryotic host cells which possess the cellular machinery for proper processing of the primary transcript, glycosylation, and phosphorylation of the gene product may be used. Such mammalian host cells include but are not limited to CHO, VERY, BHK, Hela, COS, MDCK, 293, 3T3, WI38, and in particular, breast cancer cell lines such as, for example, BT483, Hs578T, HTB2, BT20 and T47D, and normal mammary gland cell line such as, for example, CRL7030 and Hs578Bst.

[0267] For long-term, high-yield production of recombinant proteins, stable expression is preferred. For example, cell lines, which stably express the antibody molecule may be engineered. Rather than using expression vectors which contain viral origins of replication, host cells can be transformed with DNA controlled by appropriate expression control elements (e.g., promoter, enhancer, sequences, transcription terminators, polyadenylation sites, etc.), and a selectable marker. Following the introduction of the foreign DNA, engineered cells may be allowed to grow for 1-2 days in an enriched media, and then are switched to a selective media. The selectable marker in the recombinant plasmid confers resistance to the selection and allows cells to stably integrate the plasmid into their chromosomes and grow to form foci which in turn can be cloned and expanded into cell lines. This method may advantageously be used to engineer cell lines, which express the antibody molecule. Such engineered cell lines may be particularly useful in screening and evaluation of compounds that interact directly or indirectly with the antibody molecule.

[0268] A number of selection systems may be used, including but not limited to the herpes simplex virus thymidine kinase (Wigler et al., Cell 11:223 (1977)), hypoxanthine-guanine phosphoribosyltransferase (Szybalska & Szybalski, Proc. Natl. Acad. Sci. USA 48:202 (1992)), and adenine phosphoribosyltransferase (Lowy et al., Cell 22:817 (1980)) genes can be employed in tk-, hgprt- or aprt-cells, respectively. Also, antimetabolite resistance can be used as the basis of selection for the following genes: dhfr, which confers resistance to methotrexate (Wigler et al., Natl. Acad. Sci. USA 77:357 (1980); O'Hare et al., Proc. Natl. Acad. Sci. USA 78:1527 (1981)); gpt, which confers resistance to mycophenolic acid (Mulligan & Berg, Proc. Natl. Acad. Sci. USA 78:2072 (1981)); neo, which confers resistance to the aminoglycoside G418 Clinical Pharmacy 12:488-505; Wu and Wu, Biotherapy 3:87-95 (1991); Tolstoshev, Ann. Rev. Pharmacol. Toxicol. 32:573-596 (1993); Mulligan, Science 260:926-932 (1993); and Morgan and Anderson, Ann. Rev. Biochem. 62:191-217 (1993); TIB TECH 11(5):155-215 (1993)); and hygro, which confers resistance to hygromycin (Santerre et al., Gene 30:147 (1984)). Methods commonly known in the art of recombinant DNA technology may be routinely applied to select the desired recombinant clone, and such methods are described, for example, in Ausubel et al. (eds.), Current Protocols in Molecular Biology, John Wiley & Sons, NY (1993); Kriegler, Gene Transfer and Expression, A Laboratory Manual, Stockton Press, NY (1990); and in Chapters 12 and 13, Dracopoli et al. (eds), Current Protocols in Human Genetics, John Wiley & Sons, NY (1994); Colberre-Garapin et al., J. Mol. Biol. 150:1 (1981), which are incorporated by reference herein in their entireties.

[0269] The expression levels of an antibody molecule can be increased by vector amplification (for a review, see Bebbington and Hentschel, The use of vectors based on gene amplification for the expression of cloned genes in mammalian cells in DNA cloning, Vol.3. (Academic Press, New York, 1987)). When a marker in the vector system expressing antibody is amplifiable, increase in the level of inhibitor present in culture of host cell will increase the number of copies of the marker gene. Since the amplified region is associated with the antibody gene, production of the antibody will also increase (Crouse et al., Mol. Cell. Biol. 3:257 (1983)).

[0270] Vectors, which use glutamine synthase (GS) or DHFR as the selectable markers can be amplified in the presence of the drugs methionine sulphoximine or methotrexate, respectively. An advantage of glutamine synthase based vectors are the availabilty of cell lines (e.g., the murine myeloma cell line, NS0) which are glutamine synthase negative. Glutamine synthase expression systems can also function in glutamine synthase expressing cells (e.g., Chinese Hamster Ovary (CHO) cells) by providing additional inhibitor to prevent the functioning of the endogenous gene. A glutamine synthase expression system and components thereof are detailed in PCT publications: WO87/04462; WO86/05807; WO89/01036; WO89/10404; and WO91/06657, which are incorporated in their entireties by reference herein. Additionally, glutamine synthase expression vectors that may be used according to the present invention are commercially available from suplliers, including, for example Lonza Biologics, Inc. (Portsmouth, N.H.). Expression and production of monoclonal antibodies using a GS expression system in murine myeloma cells is described in Bebbington et al., Bio/technology 10:169(1992) and in Biblia and Robinson Biotechnol. Prog. 11:1 (1995) which are incorporated in their entirities by reference herein.

[0271] The host cell may be co-transfected with two expression vectors of the invention, the first vector encoding a heavy chain derived polypeptide and the second vector encoding a light chain derived polypeptide. The two vectors may contain identical selectable markers, which enable equal expression of heavy and light chain polypeptides. Alternatively, a single vector may be used which encodes, and is capable of expressing, both heavy and light chain polypeptides. In such situations, the light chain should be placed before the heavy chain to avoid an excess of toxic free heavy chain (Proudfoot, Nature 322:52 (1986); Kohler, Proc. Natl. Acad. Sci. USA 77:2197 (1980)). The coding sequences for the heavy and light chains may comprise cDNA or genomic DNA.

[0272] Once an antibody molecule of the invention has been produced by an animal, chemically synthesized, or recombinantly expressed, it may be purified by any method known in the art for purification of an immunoglobulin molecule, for example, by chromatography (e.g., ion exchange, affinity, particularly by affinity for the specific antigen after Protein A, and sizing column chromatography), centrifugation, differential solubility, or by any other standard technique for the purification of proteins. In addition, the antibodies of the present invention or fragments thereof can be fused to heterologous polypeptide sequences described herein or otherwise known in the art, to facilitate purification.

[0273] The present invention encompasses antibodies recombinantly fused or chemically conjugated (including both covalently and non-covalently conjugations) to a polypeptide (or portion thereof, preferably at least 10, 20, 30, 40, 50, 60, 70, 80, 90 or 100 amino acids of the polypeptide) of the present invention to generate fusion proteins. The fusion does not necessarily need to be direct, but may occur through linker sequences. The antibodies may be specific for antigens other than polypeptides (or portion thereof, preferably at least 10, 20, 30, 40, 50, 60, 70, 80, 90 or 100 amino acids of the polypeptide) of the present invention. For example, antibodies may be used to target the polypeptides of the present invention to particular cell types, either in vitro or in vivo, by fusing or conjugating the polypeptides of the present invention to antibodies specific for particular cell surface receptors. Antibodies fused or conjugated to the polypeptides of the present invention may also be used in in vitro immunoassays and purification methods using methods known in the art. See e.g., Harbor et al., supra, and PCT publication WO 93/21232; EP 439,095; Naramura et al., Immunol. Lett. 39:91-99 (1994); U.S. Patent 5,474,981; Gillies et al., PNAS 89:1428-1432 (1992); Fell et al., J. Immunol. 146:2446-2452 (1991), which are incorporated by reference in their entireties.

[0274] The present invention further includes compositions comprising the polypeptides of the present invention fused or conjugated to antibody domains other than the variable regions. For example, the polypeptides of the present invention may be fused or conjugated to an antibody Fc region, or portion thereof. The antibody portion fused to a polypeptide of the present invention may comprise the constant region, hinge region, CH1 domain, CH2 domain, and CH3 domain or any combination of whole domains or portions thereof. The polypeptides may also be fused or conjugated to the above antibody portions to form multimers. For example, Fc portions fused to the polypeptides of the present invention can form dimers through disulfide bonding between the Fc portions. Higher multimeric forms can be made by fusing the polypeptides to portions of IgA and IgM. Methods for fusing or conjugating the polypeptides of the present invention to antibody portions are known in the art. See, e.g., U.S. Pat. Nos. 5,336,603; 5,622,929; 5,359,046; 5,349,053; 5,447,851; 5,112,946; EP 307,434; EP 367;166; PCT publications WO 96/04388; WO 91/06570; Ashkenazi et al., Proc. Natl. Acad. Sci. USA 88:10535-10539 (1991); Zheng et al., J. Immunol. 154:5590-5600 (1995); and Vil et al., Proc. Natl. Acad. Sci. USA 89:11337-11341 (1992) (said references incorporated by reference in their entireties).

[0275] As discussed, supra, the polypeptides corresponding to a polypeptide, polypeptide fragment, or a variant of SEQ ID NO:Y may be fused or conjugated to the above antibody portions to increase the in vivo half life of the polypeptides or for use in immunoassays using methods known in the art. Further, the polypeptides corresponding to SEQ ID NO:Y may be fused or conjugated to the above antibody portions to facilitate purification. One reported example describes chimeric proteins consisting of the first two domains of the human CD4-polypeptide and various domains of the constant regions of the heavy or light chains of mammalian immunoglobulins. See EP 394,827; Traunecker et al., Nature 331:84-86 (1988). The polypeptides of the present invention fused or conjugated to an antibody having disulfide-linked dimeric structures (due to the IgG) may also be more efficient in binding and neutralizing other molecules, than the monomeric secreted protein or protein fragment alone. See, for example, Fountoulakis et al., J. Biochem. 270:3958-3964 (1995). In many cases, the Fc part in a fusion protein is beneficial in therapy and diagnosis, and thus can result in, for example, improved pharmacokinetic properties. See, for example, EP A 232,262. Alternatively, deleting the Fc part after the fusion protein has been expressed, detected, and purified, would be desired. For example, the Fc portion may hinder therapy and diagnosis if the fusion protein is used as an antigen for immunizations. In drug discovery, for example, human proteins, such as hIL-5, have been fused with Fc portions for the purpose of high-throughput screening assays to identify antagonists of hIL-5. (See, Bennett et al., J. Molecular Recognition 8:52-58 (1995); Johanson et al., J. Biol. Chem. 270:9459-9471 (1995)).

[0276] Moreover, the antibodies or fragments thereof of the present invention can be fused to marker sequences, such as a peptide to facilitate purification. In preferred embodiments, the marker amino acid sequence is a hexa-histidine peptide, such as the tag provided in a pQE vector (QIAGEN, Inc., 9259 Eton Avenue, Chatsworth, Calif., 91311), among others, many of which are commercially available. As described in Gentz et al., Proc. Natl. Acad. Sci. USA 86:821-824 (1989), for instance, hexa-histidine provides for convenient purification of the fusion protein. Other peptide tags useful for purification include, but are not limited to, the “HA” tag, which corresponds to an epitope derived from the influenza hemagglutinin protein (Wilson et al., Cell 37:767 (1984)) and the “flag” tag.

[0277] The present invention further encompasses antibodies or fragments thereof conjugated to a diagnostic or therapeutic agent. The antibodies can be used diagnostically to, for example, monitor the development or progression of a tumor as part of a clinical testing procedure to, e.g., determine the efficacy of a given treatment regimen. Detection can be facilitated by coupling the antibody to a detectable substance. Examples of detectable substances include various enzymes, prosthetic groups, fluorescent materials, luminescent materials, bioluminescent materials, radioactive materials, positron emitting metals using various positron emission tomographies, and nonradioactive paramagnetic metal ions. The detectable substance may be coupled or conjugated either directly to the antibody (or fragment thereof) or indirectly, through an intermediate (such as, for example, a linker known in the art) using techniques known in the art. See, for example, U.S. Pat. No. 4,741,900 for metal ions which can be conjugated to antibodies for use as diagnostics according to the present invention.

[0278] Further, an antibody or fragment thereof may be conjugated to a therapeutic moiety such as a cytotoxin, e.g., a cytostatic or cytocidal agent, a therapeutic agent or a radioactive metal ion, e.g., alpha-emitters such as, for example, 213Bi. A cytotoxin or cytotoxic agent includes any agent that is detrimental to cells. Examples include paclitaxol, cytochalasin B, gramicidin D, ethidium bromide, emetine, mitomycin, etoposide, tenoposide, vincristine, vinblastine, colchicin, doxorubicin, daunorubicin, dihydroxy anthracin dione, mitoxantrone, mithramycin, actinomycin D, 1-dehydrotestosterone, glucocorticoids, procaine, tetracaine, lidocaine, propranolol, and puromycin and analogs or homologs thereof. Therapeutic agents include, but are not limited to, antimetabolites (e.g., methotrexate, 6-mercaptopurine, 6-thioguanine, cytarabine, 5-fluorouracil decarbazine), alkylating agents (e.g., mechlorethamine, thioepa chlorambucil, melphalan, carmustine (BSNU) and lomustine (CCNU), cyclothosphamide, busulfan, dibromomannitol, streptozotocin, mitomycin C, and cis- dichlorodiamine platinum (II) (DDP) cisplatin), anthracyclines (e.g., daunorubicin (formerly daunomycin) and doxorubicin), antibiotics (e.g., dactinomycin (formerly actinomycin), bleomycin, mithramycin, and anthramycin (AMC)), and anti-mitotic agents (e.g., vincristine and vinblastine).

[0279] The conjugates of the invention can be used for modifying a given biological response, the therapeutic agent or drug moiety is not to be construed as limited to classical chemical therapeutic agents. For example, the drug moiety may be a protein or polypeptide possessing a desired biological activity. Such proteins may include, for example, a toxin such as abrin, ricin A, pseudomonas exotoxin, or diphtheria toxin; a protein such as tumor necrosis factor, a-interferon, β-interferon, nerve growth factor, platelet derived growth factor, tissue plasminogen activator, an apoptotic agent, e.g., TNF-alpha, TNF-beta, AIM I (See, International Publication No. WO 97/33899), AIM II (See, International Publication No. WO 97/34911), Fas Ligand (Takahashi et al., Int. Immunol., 6:1567-1574 (1994)), VEGI (See, International Publication No. WO 99/23105), a thrombotic agent or an anti- angiogenic agent, e.g., angiostatin or endostatin; or, biological response modifiers such as, for example, lymphokines, interleukin-1 (“IL-1”), interleukin-2 (“IL-2”), interleukin-6 (“IL-6”), granulocyte macrophage colony stimulating factor (“GM-CSF”), granulocyte colony stimulating factor (“G-CSF”), or other growth factors.

[0280] Antibodies may also be attached to solid supports, which are particularly useful for immunoassays or purification of the target antigen. Such solid supports include, but are not limited to, glass, cellulose, polyacrylamide, nylon, polystyrene, polyvinyl chloride or polypropylene.

[0281] Techniques for conjugating such therapeutic moiety to antibodies are well known. See, for example, Arnon et al., “Monoclonal Antibodies For Immunotargeting Of Drugs In Cancer Therapy”, in Monoclonal Antibodies And Cancer Therapy, Reisfeld et al. (eds.), pp. 243-56 (Alan R. Liss, Inc. 1985); Hellstrom et al., “Antibodies For Drug Delivery”, in Controlled Drug Delivery (2nd Ed.), Robinson et al. (eds.), pp. 623-53 (Marcel Dekker, Inc. 1987); Thorpe, “Antibody Carriers Of Cytotoxic Agents In Cancer Therapy: A Review”, in Monoclonal Antibodies '84: Biological And Clinical Applications, Pinchera et al. (eds.), pp. 475-506 (1985); “Analysis, Results, And Future Prospective Of The Therapeutic Use Of Radiolabeled Antibody In Cancer Therapy”, in Monoclonal Antibodies For Cancer Detection And Therapy, Baldwin et al. (eds.), pp. 303-16 (Academic Press 1985), and Thorpe et al., “The Preparation And Cytotoxic Properties Of Antibody-Toxin Conjugates”, Immunol. Rev. 62:119-58 (1982).

[0282] Alternatively, an antibody can be conjugated to a second antibody to form an antibody heteroconjugate as described by Segal in U.S. Pat. No. 4,676,980, which is incorporated herein by reference in its entirety.

[0283] An antibody, with or without a therapeutic moiety conjugated to it, administered alone or in combination with cytotoxic factor(s) and/or cytokine(s) can be used as a therapeutic.

[0284] Immunophenotyping

[0285] The antibodies of the invention may be utilized for immunophenotyping of cell lines and biological samples. Translation products of the genes of the present invention may be useful as cell specific markers, or more specifically as cellular markers that are differentially expressed at various stages of differentiation and/or maturation of particular cell types. Monoclonal antibodies directed against a specific epitope, or combination of epitopes, will allow for the screening of cellular populations expressing the marker. Various techniques can be utilized using monoclonal antibodies to screen for cellular populations expressing the marker(s), and include magnetic separation using antibody-coated magnetic beads, “panning” with antibody attached to a solid matrix (i.e., plate), and flow cytometry (See, e.g., U.S. Pat. No. 5,985,660; and Morrison et al., Cell, 96:737-49 (1999)).

[0286] These techniques allow for the screening of particular populations of cells, such as might be found with hematological malignancies (i.e. minimal residual disease (MRD) in acute leukemic patients) and “non-self” cells in transplantations to prevent Graft-versus-Host Disease (GVHD). Alternatively, these techniques allow for the screening of hematopoietic stem and progenitor cells capable of undergoing proliferation and/or differentiation, as might be found in human umbilical cord blood.

[0287] Assays for Antibody Binding

[0288] The antibodies of the invention may be assayed for immunospecific binding by any method known in the art. The immunoassays which can be used include but are not limited to competitive and non-competitive assay systems using techniques such as western blots, radioimmunoassays, ELISA (enzyme linked immunosorbent assay), “sandwich” immunoassays, immunoprecipitation assays, precipitin reactions, gel diffusion precipitin reactions, immunodiffusion assays, agglutination assays, complement-fixation assays, immunoradiometric assays, fluorescent immunoassays, and protein A immunoassays, to name but a few. Such assays are routine and well known in the art (see, e.g., Ausubel et al, eds, 1994, Current Protocols in Molecular Biology, Vol. 1, John Wiley & Sons, Inc., New York, which is incorporated by reference herein in its entirety). Exemplary immunoassays are described briefly below (but are not intended by way of limitation).

[0289] Immunoprecipitation protocols generally comprise lysing a population of cells in a lysis buffer such as RIPA buffer (1% NP-40 or Triton X-100, 1% sodium deoxycholate, 0.1% SDS, 0.15 M NaCl, 0.01 M sodium phosphate at pH 7.2, 1% Trasylol) supplemented with protein phosphatase and/or protease inhibitors (e.g., EDTA, PMSF, aprotinin, sodium vanadate), adding the antibody of interest to the cell lysate, incubating for a period of time (e.g., 1-4 hours) at 4° C., adding protein A and/or protein G sepharose beads to the cell lysate, incubating for about an hour or more at 4° C., washing the beads in lysis buffer and resuspending the beads in SDS/sample buffer. The ability of the antibody of interest to immunoprecipitate a particular antigen can be assessed by, e.g., western blot analysis. One of skill in the art would be knowledgeable as to the parameters that can be modified to increase the binding of the antibody to an antigen and decrease the background (e.g., pre-clearing the cell lysate with sepharose beads). For further discussion regarding immunoprecipitation protocols see, e.g., Ausubel et al., eds., (1994), Current Protocols in Molecular Biology, Vol. 1, John Wiley & Sons, Inc., New York, section 10.16.1.

[0290] Western blot analysis generally comprises preparing protein samples, electrophoresis of the protein samples in a polyacrylamide gel (e.g., 8%- 20% SDS-PAGE depending on the molecular weight of the antigen), transferring the protein sample from the polyacrylamide gel to a membrane such as nitrocellulose, PVDF or nylon, blocking the membrane in blocking solution (e.g., PBS with 3% BSA or non-fat milk), washing the membrane in washing buffer (e.g., PBS-Tween 20), blocking the membrane with primary antibody (the antibody of interest) diluted in blocking buffer, washing the membrane in washing buffer, blocking the membrane with a secondary antibody (which recognizes the primary antibody, e.g., an anti-human antibody) conjugated to an enzymatic substrate (e.g., horseradish peroxidase or alkaline phosphatase) or radioactive molecule (e.g., 32P or 125I) diluted in blocking buffer, washing the membrane in wash buffer, and detecting the presence of the antigen. One of skill in the art would be knowledgeable as to the parameters that can be modified to increase the signal detected and to reduce the background noise. For further discussion regarding western blot protocols see, e.g., Ausubel et al., eds., (1994), Current Protocols in Molecular Biology, Vol. 1, John Wiley & Sons, Inc., New York, section 10.8.1.

[0291] ELISAs comprise preparing antigen, coating the well of a 96 well microtiter plate with the antigen, adding the antibody of interest conjugated to a detectable compound such as an enzymatic substrate (e.g., horseradish peroxidase or alkaline phosphatase) to the well and incubating for a period of time, and detecting the presence of the antigen. In ELISAs the antibody of interest does not have to be conjugated to a detectable compound; instead, a second antibody (which recognizes the antibody of interest) conjugated to a detectable compound may be added to the well. Further, instead of coating the well with the antigen, the antibody may be coated to the well. In this case, a second antibody conjugated to a detectable compound may be added following the addition of the antigen of interest to the coated well. One of skill in the art would be knowledgeable as to the parameters that can be modified to increase the signal detected as well as other variations of ELISAs known in the art. For further discussion regarding ELISAs see, e.g., Ausubel et al., eds, (1994), Current Protocols in Molecular Biology, Vol. 1, John Wiley & Sons, Inc., New York, section 11.2.1.

[0292] The binding affinity of an antibody to an antigen and the off-rate of an antibody-antigen interaction can be determined by competitive binding assays. One example of a competitive binding assay is a radioimmunoassay comprising the incubation of labeled antigen (e.g., 3H or 125I) with the antibody of interest in the presence of increasing amounts of unlabeled antigen, and the detection of the antibody bound to the labeled antigen. The affinity of the antibody of interest for a particular antigen and the binding off-rates can be determined from the data by scatchard plot analysis. Competition with a second antibody can also be determined using radioimmunoassays. In this case, the antigen is incubated with antibody of interest conjugated to a labeled compound (e.g., 3H or 125I) in the presence of increasing amounts of an unlabeled second antibody.

[0293] Antibodies of the invention may be characterized using immunocytochemisty methods on cells (e.g., mammalian cells, such as CHO cells) transfected with a vector enabling the expression of a colon antigen or with vector alone using techniques commonly known in the art. Antibodies that bind colon antigen transfected cells, but not vector-only transfected cells, are colon antigen specific.

[0294] Therapeutic Uses

[0295] The present invention is further directed to antibody-based therapies which involve administering antibodies of the invention to an animal, preferably a mammal, and most preferably a human, patient for treating one or more of the disclosed diseases, disorders, or conditions. Therapeutic compounds of the invention include, but are not limited to, antibodies of the invention (including fragments, analogs and derivatives thereof as described herein) and nucleic acids encoding antibodies of the invention (including fragments, analogs and derivatives thereof and anti-idiotypic antibodies as described herein). The antibodies of the invention can be used to treat, inhibit or prevent diseases, disorders or conditions associated with aberrant expression and/or activity of a polypeptide of the invention, including, but not limited to, any one or more of the diseases, disorders, or conditions described herein. The treatment and/or prevention of diseases, disorders, or conditions associated with aberrant expression and/or activity of a polypeptide of the invention includes, but is not limited to, alleviating symptoms associated with those diseases, disorders or conditions. Antibodies of the invention may be provided in pharmaceutically acceptable compositions as known in the art or as described herein.

[0296] In a specific and preferred embodiment, the present invention is directed to antibody-based therapies which involve administering antibodies of the invention to an animal, preferably a mammal, and most preferably a human, patient for treating one or more of the diseases, disorders, or conditions of the colon, including, but not limited to, congenital abnormalities, such as atresia and stenosis, Meckel diverticulum, congential aganglionic megacolon or Hirschsprung disease; colonic diverticulitis, colonic diverticulosis, toxic megacolon, constipation, disorders caused by parasites and protozoa (e.g., amoebic colitis, anisakiasis, balantidiasis, blastocystis infections, cryptosporidiosis, dientamoebiasis, amoebic dysentery, giardiasis, Lymphopathia venereum, Entamoeba histolytica), bacteria infection (e.g., Shigella, Salmonella, Yersinia, E. coli, Clostridium difficile), viral infection (e.g., cytomegalic virus, rotovirus); inflammatory bowel disease (e.g., ulcerative colitis, Crohn's disease, eosinophilic colitis); neoplastic disorders, such as, polyps (e.g., sessile polyp, adenomatous polyp, inflammatory polyps), adenomas (e.g., tubular adenoma, tubovillous adenomas, villous adenoma, Gardner syndrome, Peutz-Jeghers syndrome), hyperplastic, polyposis, villous, pseudopolyps, leiomyomas, carcinoids, lipomas, and angiomas, cancers, such as, rectal cancer, adenocarcinoma, colorectal carcinoma, colon cancer, colon carcinoma, colorectal cancer; colonic diseases); miscellaneous intestinal inflammatory disorders, including acquired immunodeficiency syndrome, HIV enteropathy, transplantation, drug-induced intestinal injury, radiation enterocolitis, neutropenic colitis, diverticular colon disease (DCD), inflammatory colonic disease, ischemic colitis, radiation proctitis, non-inflammatory bowel disease (non-IBD), colonic inflammation; colitis (e.g., infectious enterocolitis, necrotizing enterocolitis, antibiotic-associated colitis (pseudomembranous colitis), and collagenous and lymphocytic colitis); diarrhea and dysentary, malabsorption syndromes (e.g., blind loop syndrome, lactose intolerance, short bowl syndrome, whipple's disease), mesenteric vascular occlusion, pneumatosis cystoides intestinalis, protein-losing enteropathies (intestinal lymphagiectasis); intestinal obstruction (e.g., afferent loop syndrome, impacted feces, intestinal pseudo-obstruction [cecal volvulus], intussusception), intestinal perforation, sigmoid diseases (e.g., proctocolitis, sigmoin neoplasms), and/or as described under “Gastrointestinal Disorders” below. Therapeutic compounds of the invention include, but are not limited to, antibodies of the invention (e.g., antibodies directed to the full length protein expressed on the cell surface of a mammalian cell; antibodies directed to an epitope of a colon associated polypeptide of the invention (such as, a linear epitope (shown in Table 1A, column 6) or a conformational epitope), including fragments, analogs and derivatives thereof as described herein) and nucleic acids encoding antibodies of the invention (including fragments, analogs and derivatives thereof and anti-idiotypic antibodies as described herein). The antibodies of the invention can be used to treat, inhibit or prevent diseases, disorders or conditions associated with aberrant expression and/or activity of a polypeptide of the invention, including, but not limited to, any one or more of the diseases, disorders, or conditions of the colon described herein. The treatment and/or prevention of diseases, disorders, or conditions of the colon associated with aberrant expression and/or activity of a polypeptide of the invention includes, but is not limited to, alleviating symptoms associated with those diseases, disorders or conditions. Antibodies of the invention may be provided in pharmaceutically acceptable compositions as known in the art or as described herein.

[0297] A summary of the ways in which the antibodies of the present invention may be used therapeutically includes binding polynucleotides or polypeptides of the present invention locally or systemically in the body or by direct cytotoxicity of the antibody, e.g. as mediated by complement (CDC) or by effector cells (ADCC). Some of these approaches are described in more detail below. Armed with the teachings provided herein, one of ordinary skill in the art will know how to use the antibodies of the present invention for diagnostic, monitoring or therapeutic purposes without undue experimentation.

[0298] The antibodies of this invention may be advantageously utilized in combination with other monoclonal or chimeric antibodies, or with lymphokines or hematopoietic growth factors (such as, e.g., IL-2, IL-3 and IL-7), for example, which serve to increase the number or activity of effector cells which interact with the antibodies.

[0299] The antibodies of the invention may be administered alone or in combination with other types of treatments (e.g., radiation therapy, chemotherapy, hormonal therapy, immunotherapy and anti-tumor agents). Generally, administration of products of a species origin or species reactivity (in the case of antibodies) that is the same species as that of the patient is preferred. Thus, in a preferred embodiment, human antibodies, fragments derivatives, analogs, or nucleic acids, are administered to a human patient for therapy or prophylaxis.

[0300] It is preferred to use high affinity and/or potent in vivo inhibiting and/or neutralizing antibodies against polypeptides or polynucleotides of the present invention, fragments or regions thereof, for both immunoassays directed to and therapy of disorders related to polynucleotides or polypeptides, including fragments thereof, of the present invention. Such antibodies, fragments, or regions, will preferably have an affinity for polynucleotides or polypeptides of the invention, including fragments thereof. Preferred binding affinities include those with a dissociation constant or Kd less than 5×10⁻² M, 10⁻² M, 5×10⁻³ M, 10⁻³ M, 5×10⁻⁴ M, 10⁻⁴ M, 5×10⁻⁵ M, 10⁻⁵ M, 5×10⁻⁶ M, 10⁻⁶ M, 5×10⁻⁷ M, 10⁻⁷ M, 5×10⁻⁸ M, 10⁻⁸ M, 5×10⁻⁹ M, 10⁻⁹ M, 5×10⁻¹⁰ M, 10⁻¹⁰ M, 5×10⁻¹¹ M, 10⁻¹¹ M, 10⁻¹¹ M, 5×10−12 M, 10⁻¹² M, 5×10⁻¹³ M, 10⁻¹³ M, 5×10⁻¹⁴ M, 10⁻¹⁴ M, 5×10⁻¹⁵ M, and 10⁻¹⁵ M.

[0301] Gene Therapy

[0302] In a specific embodiment, nucleic acids comprising sequences encoding antibodies or functional derivatives thereof, are administered to treat, inhibit or prevent a disease or disorder associated with aberrant expression and/or activity of a polypeptide of the invention, by way of gene therapy. Gene therapy refers to therapy performed by the administration to a subject of an expressed or expressible nucleic acid. In this embodiment of the invention, the nucleic acids produce their encoded protein that mediates a therapeutic effect.

[0303] Any of the methods for gene therapy available in the art can be used according to the present invention. Exemplary methods are described below.

[0304] For general reviews of the methods of gene therapy, see Goldspiel et al., Clinical Pharmacy 12:488-505 (1993); Wu and Wu, Biotherapy 3:87-95 (1991); Tolstoshev, Ann. Rev. Pharmacol. Toxicol. 32:573-596 (1993); Mulligan, Science 260:926-932 (1993); and Morgan and Anderson, Ann. Rev. Biochem. 62:191-217 (1993); May, TIBTECH 11(5):155-215 (1993). Methods commonly known in the art of recombinant DNA technology which can be used are described in Ausubel et al. (eds.), Current Protocols in Molecular Biology, John Wiley & Sons, NY (1993); and Kriegler, Gene Transfer and Expression, A Laboratory Manual, Stockton Press, NY (1990).

[0305] In a preferred embodiment, the compound comprises nucleic acid sequences encoding an antibody, said nucleic acid sequences being part of expression vectors that express the antibody or fragments or chimeric proteins or heavy or light chains thereof in a suitable host. In particular, such nucleic acid sequences have promoters operably linked to the antibody coding region, said promoter being inducible or constitutive, and, optionally, tissue-specific. In another particular embodiment, nucleic acid molecules are used in which the antibody coding sequences and any other desired sequences are flanked by regions that promote homologous recombination at a desired site in the genome, thus providing for intrachromosomal expression of the antibody encoding nucleic acids (Koller and Smithies, Proc. Natl. Acad. Sci. USA 86:8932-8935 (1989); Zijlstra et al., Nature 342:435-438 (1989). In specific embodiments, the expressed antibody molecule is a single chain antibody; alternatively, the nucleic acid sequences include sequences encoding both the heavy and light chains, or fragments thereof, of the antibody.

[0306] Delivery of the nucleic acids into a patient may be either direct, in which case the patient is directly exposed to the nucleic acid or nucleic acid-carrying vectors, or indirect, in which case, cells are first transformed with the nucleic acids in vitro, then transplanted into the patient. These two approaches are known, respectively, as in vivo or ex vivo gene therapy.

[0307] In a specific embodiment, the nucleic acid sequences are directly administered in vivo, where it is expressed to produce the encoded product. This can be accomplished by any of numerous methods known in the art, e.g., by constructing them as part of an appropriate nucleic acid expression vector and administering it so that they become intracellular, e.g., by infection using defective or attenuated retrovirals or other viral vectors (see U.S. Pat. No. 4,980,286), or by direct injection of naked DNA, or by use of microparticle bombardment (e.g., a gene gun; Biolistic, Dupont), or coating with lipids or cell-surface receptors or transfecting agents, encapsulation in liposomes, microparticles, or microcapsules, or by administering them in linkage to a peptide which is known to enter the nucleus, by administering it in linkage to a ligand subject to receptor-mediated endocytosis (see, e.g., Wu and Wu, J. Biol. Chem. 262:4429-4432 (1987)) (which can be used to target cell types specifically expressing the receptors), etc. In another embodiment, nucleic acid-ligand complexes can be formed in which the ligand comprises a fusogenic viral peptide to disrupt endosomes, allowing the nucleic acid to avoid lysosomal degradation. In yet another embodiment, the nucleic acid can be targeted in vivo for cell specific uptake and expression, by targeting a specific receptor (see, e.g., PCT Publications WO 92/06180; WO 92/22635; WO92/20316; WO93/14188, WO 93/20221). Alternatively, the nucleic acid can be introduced intracellularly and incorporated within host cell DNA for expression, by homologous recombination (Koller and Smithies, Proc. Natl. Acad. Sci. USA 86:8932-8935 (1989); Zijlstra et al., Nature 342:435-438 (1989)).

[0308] In a specific embodiment, viral vectors that contains nucleic acid sequences encoding an antibody of the invention are used. For example, a retroviral vector can be used (see Miller et al., Meth. Enzymol. 217:581-599 (1993)). These retroviral vectors contain the components necessary for the correct packaging of the viral genome and integration into the host cell DNA. The nucleic acid sequences encoding the antibody to be used in gene therapy are cloned into one or more vectors, which facilitates delivery of the gene into a patient. More detail about retroviral vectors can be found in Boesen et al., Biotherapy 6:291-302 (1994), which describes the use of a retroviral vector to deliver the mdrl gene to hematopoietic stem cells in order to make the stem cells more resistant to chemotherapy. Other references illustrating the use of retroviral vectors in gene therapy are: Clowes et al., J. Clin. Invest. 93:644-651 (1994); Kiem et al., Blood 83:1467-1473 (1994); Salmons and Gunzberg, Human Gene Therapy 4:129-141 (1993); and Grossman and Wilson, Curr. Opin. in Genetics and Devel. 3:110-114 (1993).

[0309] Adenoviruses are other viral vectors that can be used in gene therapy. Adenoviruses are especially attractive vehicles for delivering genes to respiratory epithelia. Adenoviruses naturally infect respiratory epithelia where they cause a mild disease. Other targets for adenovirus-based delivery systems are liver, the central nervous system, endothelial cells, and muscle. Adenoviruses have the advantage of being capable of infecting non-dividing cells. Kozarsky and Wilson, Current Opinion in Genetics and Development 3:499-503 (1993) present a review of adenovirus-based gene therapy. Bout et al., Human Gene Therapy 5:3-10 (1994) demonstrated the use of adenovirus vectors to transfer genes to the respiratory epithelia of rhesus monkeys. Other instances of the use of adenoviruses in gene therapy can be found in Rosenfeld et al., Science 252:431-434 (1991); Rosenfeld et al., Cell 68:143-155 (1992); Mastrangeli et al., J. Clin. Invest. 91:225-234 (1993); PCT Publication WO94/12649; and Wang, et al., Gene Therapy 2:775-783 (1995). In a preferred embodiment, adenovirus vectors are used.

[0310] Adeno-associated virus (AAV) has also been proposed for use in gene therapy (Walsh et al., Proc. Soc. Exp. Biol. Med. 204:289-300 (1993); U.S. Pat. No. 5,436,146).

[0311] Another approach to gene therapy involves transferring a gene to cells in tissue culture by such methods as electroporation, lipofection, calcium phosphate mediated transfection, or viral infection. Usually, the method of transfer includes the transfer of a selectable marker to the cells. The cells are then placed under selection to isolate those cells that have taken up and are expressing the transferred gene. Those cells are then delivered to a patient.

[0312] In this embodiment, the nucleic acid is introduced into a cell prior to administration in vivo of the resulting recombinant cell. Such introduction can be carried out by any method known in the art, including but not limited to transfection, electroporation, microinjection, infection with a viral or bacteriophage vector containing the nucleic acid sequences, cell fusion, chromosome-mediated gene transfer, microcell-mediated gene transfer, spheroplast fusion, etc. Numerous techniques are known in the art for the introduction of foreign genes into cells (see, e.g., Loeffler and Behr, Meth. Enzymol. 217:599-618 (1993); Cohen et al., Meth. Enzymol. 217:618-644 (1993); Cline, Pharmac. Ther. 29:69-92m (1985) and may be used in accordance with the present invention, provided that the necessary developmental and physiological functions of the recipient cells are not disrupted. The technique should provide for the stable transfer of the nucleic acid to the cell, so that the nucleic acid is expressible by the cell and preferably heritable and expressible by its cell progeny.

[0313] The resulting recombinant cells can be delivered to a patient by various methods known in the art. Recombinant blood cells (e.g., hematopoietic stem or progenitor cells) are preferably administered intravenously. The amount of cells envisioned for use depends on the desired effect, patient state, etc., and can be determined by one skilled in the art.

[0314] Cells into which a nucleic acid can be introduced for purposes of gene therapy encompass any desired, available cell type, and include but are not limited to epithelial cells, endothelial cells, keratinocytes, fibroblasts, muscle cells, hepatocytes; blood cells such as T lymphocytes, B lymphocytes, monocytes, macrophages, neutrophils, eosinophils, megakaryocytes, granulocytes; various stem or progenitor cell, in particular hematopoietic stem or progenitor cells, e.g., as obtained from bone marrow, umbilical cord blood, peripheral blood, fetal liver, etc.

[0315] In a preferred embodiment, the cell used for gene therapy is autologous to patient.

[0316] In an embodiment in which recombinant cells are used in gene therapy, nucleic acid sequences encoding an antibody are introduced into the cells such that they are expressible by the cells or their progeny, and the recombinant cells are then administered in vivo for therapeutic effect. In a specific embodiment, stem or progenitor cells are used. Any stem and/or progenitor cells which can be isolated and maintained in vitro can potentially be used in accordance with this embodiment of the present invention (see e.g. PCT Publication WO 94/08598; Stemple and Anderson, Cell 71:973-985 (1992); Rheinwald, Meth. Cell Bio. 21A:229 (1980); and Pittelkow and Scott, Mayo Clinic Proc. 61:771 (1986)).

[0317] In a specific embodiment, the nucleic acid to be introduced for purposes of gene therapy comprises an inducible promoter operably linked to the coding region, such that expression of the nucleic acid is controllable by the presence or absence of an appropriate inducer of transcription.

[0318] Demonstration of Therapeutic or Prophylactic Activity

[0319] The compounds or pharmaceutical compositions of the invention are preferably tested in vitro, and then in vivo for the desired therapeutic or prophylactic activity, prior to use in humans. For example, in vitro assays to demonstrate the therapeutic or prophylactic utility of a compound or pharmaceutical composition include, the effect of a compound on a cell line or a patient tissue sample. The effect of the compound or composition on the cell line and/or tissue sample can be determined utilizing, techniques known to those of skill in the art including, but not limited to, rosette formation assays and cell lysis assays. In accordance with the invention, in vitro assays which can be used to determine whether administration of a specific compound is indicated, include in vitro cell culture assays in which a patient tissue sample is grown in culture, and exposed to or otherwise administered a compound, and the effect of such compound upon the tissue sample is observed.

[0320] Therapeutic/Prophylactic Administration and Composition

[0321] The invention provides methods of treatment, inhibition and prophylaxis by administration to a subject of an effective amount of a compound or pharmaceutical composition of the invention, preferably a polypeptide or antibody of the invention. In a preferred embodiment, the compound is substantially purified (e.g., substantially free from substances that limit its effect or produce undesired side-effects). The subject is preferably an animal, including but not limited to animals such as cows, pigs, horses, chickens, cats, dogs, etc., and is preferably a mammal, and most preferably human.

[0322] Formulations and methods of administration that can be employed when the compound comprises a nucleic acid or an immunoglobulin are described above; additional appropriate formulations and routes of administration can be selected from among those described herein below.

[0323] Various delivery systems are known and can be used to administer a compound of the invention, e.g., encapsulation in liposomes, microparticles, microcapsules, recombinant cells capable of expressing the compound, receptor-mediated endocytosis (see, e.g., Wu and Wu, J. Biol. Chem. 262:4429-4432 (1987)), construction of a nucleic acid as part of a retroviral or other vector, etc. Methods of introduction include but are not limited to intradermal, intramuscular, intraperitoneal, intravenous, subcutaneous, intranasal, epidural, and oral routes. The compounds or compositions may be administered by any convenient route, for example by infusion or bolus injection, by absorption through epithelial or mucocutaneous linings (e.g., oral mucosa, rectal and intestinal mucosa, etc.) and may be administered together with other biologically active agents. Administration can be systemic or local. In addition, it may be desirable to introduce the pharmaceutical compounds or compositions of the invention into the central nervous system by any suitable route, including intraventricular and intrathecal injection; intraventricular injection may be facilitated by an intraventricular catheter, for example, attached to a reservoir, such as an Ommaya reservoir. Pulmonary administration can also be employed, e.g., by use of an inhaler or nebulizer, and formulation with an aerosolizing agent.

[0324] In a specific embodiment, it may be desirable to administer the pharmaceutical compounds or compositions of the invention locally to the area in need of treatment; this may be achieved by, for example, and not by way of limitation, local infusion during surgery, topical application, e.g., in conjunction with a wound dressing after surgery, by injection, by means of a catheter, by means of a suppository, or by means of an implant, said implant being of a porous, non-porous, or gelatinous material, including membranes, such as sialastic membranes, or fibers. Preferably, when administering a protein, including an antibody, of the invention, care must be taken to use materials to which the protein does not absorb.

[0325] In another embodiment, the compound or composition can be delivered in a vesicle, in particular a liposome (see Langer, Science 249:1527-1533 (1990); Treat et al., in Liposomes in the Therapy of Infectious Disease and Cancer, Lopez-Berestein and Fidler (eds.), Liss, N.Y., pp. 353-365 (1989); Lopez-Berestein, ibid., pp. 317-327; see generally ibid.)

[0326] In yet another embodiment, the compound or composition can be delivered in a controlled release system. In one embodiment, a pump may be used (see Langer, supra; Sefton, CRC Crit. Ref. Biomed. Eng. 14:201 (1987); Buchwald et al., Surgery 88:507 (1980); Saudek et al., N. Engl. J. Med. 321:574 (1989)). In another embodiment, polymeric materials can be used (see Medical Applications of Controlled Release, Langer and Wise (eds.), CRC Pres., Boca Raton, Fla. (1974); Controlled Drug Bioavailability, Drug Product Design and Performance, Smolen and Ball (eds.), Wiley, N.Y. (1984); Ranger and Peppas, J., Macromol. Sci. Rev. Macromol. Chem. 23:61 (1983); see also Levy et al., Science 228:190 (1985); During et al., Ann. Neurol. 25:351 (1989); Howard et al., J.Neurosurg. 71:105 (1989)). In yet another embodiment, a controlled release system can be placed in proximity of the therapeutic target, e.g., the brain, thus requiring only a fraction of the systemic dose (see, e.g., Goodson, in Medical Applications of Controlled Release, supra, vol. 2, pp. 115-138 (1984)).

[0327] Other controlled release systems are discussed in the review by Langer (Science 249:1527-1533 (1990)).

[0328] In a specific embodiment where the compound of the invention is a nucleic acid encoding a protein, the nucleic acid can be administered in vivo to promote expression of its encoded protein, by constructing it as part of an appropriate nucleic acid expression vector and administering it so that it becomes intracellular, e.g., by use of a retroviral vector (see U.S. Pat. No. 4,980,286), or by direct injection, or by use of microparticle bombardment (e.g., a gene gun; Biolistic, Dupont), or coating with lipids or cell-surface receptors or transfecting agents, or by administering it in linkage to a homeobox-like peptide which is known to enter the nucleus (see e.g., Joliot et al., Proc. Natl. Acad. Sci. USA 88:1864-1868 (1991)), etc. Alternatively, a nucleic acid can be introduced intracellularly and incorporated within host cell DNA for expression, by homologous recombination.

[0329] The present invention also provides pharmaceutical compositions. Such compositions comprise a therapeutically effective amount of a compound, and a pharmaceutically acceptable carrier. In a specific embodiment, the term “pharmaceutically acceptable” means approved by a regulatory agency of the Federal or a state government or listed in the U.S. Pharmacopeia or other generally recognized pharmacopeia for use in animals, and more particularly in humans. The term “carrier” refers to a diluent, adjuvant, excipient, or vehicle with which the therapeutic is administered. Such pharmaceutical carriers can be sterile liquids, such as water and oils, including those of petroleum, animal, vegetable or synthetic origin, such as peanut oil, soybean oil, mineral oil, sesame oil and the like. Water is a preferred carrier when the pharmaceutical composition is administered intravenously. Saline solutions and aqueous dextrose and glycerol solutions can also be employed as liquid carriers, particularly for injectable solutions. Suitable pharmaceutical excipients include starch, glucose, lactose, sucrose, gelatin, malt, rice, flour, chalk, silica gel, sodium stearate, glycerol monostearate, talc, sodium chloride, dried skim milk, glycerol, propylene, glycol, water, ethanol and the like. The composition, if desired, can also contain minor amounts of wetting or emulsifying agents, or pH buffering agents. These compositions can take the form of solutions, suspensions, emulsion, tablets, pills, capsules, powders, sustained-release formulations and the like. The composition can be formulated as a suppository, with traditional binders and carriers such as triglycerides. Oral formulation can include standard carriers such as pharmaceutical grades of mannitol, lactose, starch, magnesium stearate, sodium saccharine, cellulose, magnesium carbonate, etc. Examples of suitable pharmaceutical carriers are described in “Remington's Pharmaceutical Sciences” by E. W. Martin. Such compositions will contain a therapeutically effective amount of the compound, preferably in purified form, together with a suitable amount of carrier so as to provide the form for proper administration to the patient. The formulation should suit the mode of administration.

[0330] In a preferred embodiment, the composition is formulated in accordance with routine procedures as a pharmaceutical composition adapted for intravenous administration to human beings. Typically, compositions for intravenous administration are solutions in sterile isotonic aqueous buffer. Where necessary, the composition may also include a solubilizing agent and a local anesthetic such as lignocaine to ease pain at the site of the injection. Generally, the ingredients are supplied either separately or mixed together in unit dosage form, for example, as a dry lyophilized powder or water free concentrate in a hermetically sealed container such as an ampoule or sachette indicating the quantity of active agent. Where the composition is to be administered by infusion, it can be dispensed with an infusion bottle containing sterile pharmaceutical grade water or saline. Where the composition is administered by injection, an ampoule of sterile water for injection or saline can be provided so that the ingredients may be mixed prior to administration.

[0331] The compounds of the invention can be formulated as neutral or salt forms. Pharmaceutically acceptable salts include those formed with anions such as those derived from hydrochloric, phosphoric, acetic, oxalic, tartaric acids, etc., and those formed with cations such as those derived from sodium, potassium, ammonium, calcium, ferric hydroxides, isopropylamine, triethylamine, 2-ethylamino ethanol, histidine, procaine, etc.

[0332] The amount of the compound of the invention, which will be effective in the treatment, inhibition and prevention of a disease or disorder associated with aberrant expression and/or activity of a polypeptide of the invention can be determined by standard clinical techniques. In addition, in vitro assays may optionally be employed to help identify optimal dosage ranges. The precise dose to be employed in the formulation will also depend on the route of administration, and the seriousness of the disease or disorder, and should be decided according to the judgment of the practitioner and each patient's circumstances. Effective doses may be extrapolated from dose-response curves derived from in vitro or animal model test systems.

[0333] For antibodies, the dosage administered to a patient is typically 0.1 mg/kg to 100 mg/kg of the patient's body weight. Preferably, the dosage administered to a patient is between 0.1 mg/kg and 20 mg/kg of the patient's body weight, more preferably 1 mg/kg to 10 mg/kg of the patient's body weight. Generally, human antibodies have a longer half-life within the human body than antibodies from other species due to the immune response to the foreign polypeptides. Thus, lower dosages of human antibodies and less frequent administration is often possible. Further, the dosage and frequency of administration of antibodies of the invention may be reduced by enhancing uptake and tissue penetration (e.g., into the brain) of the antibodies by modifications such as, for example, lipidation.

[0334] The invention also provides a pharmaceutical pack or kit comprising one or more containers filled with one or more of the ingredients of the pharmaceutical compositions of the invention. Optionally associated with such container(s) can be a notice in the form prescribed by a governmental agency regulating the manufacture, use or sale of pharmaceuticals or biological products, which notice reflects approval by the agency of manufacture, use or sale for human administration.

[0335] Diagnosis and Imaging

[0336] Labeled antibodies, and derivatives and analogs thereof, which specifically bind to a polypeptide of interest can be used for diagnostic purposes to detect, diagnose, or monitor diseases, disorders, and/or conditions associated with the aberrant expression and/or activity of a polypeptide of the invention. The invention provides for the detection of aberrant expression of a polypeptide of interest, comprising (a) assaying the expression of the polypeptide of interest in cells or body fluid of an individual using one or more antibodies specific to the polypeptide interest and (b) comparing the level of gene expression with a standard gene expression level, whereby an increase or decrease in the assayed polypeptide gene expression level compared to the standard expression level is indicative of aberrant expression.

[0337] The invention provides a diagnostic assay for diagnosing a colon disorder, comprising (a) assaying the expression of the polypeptide of interest in cells or body fluid of an individual using one or more antibodies specific to the polypeptide interest and (b) comparing the level of gene expression with a standard gene expression level, whereby an increase or decrease in the assayed polypeptide gene expression level compared to the standard expression level is indicative of a particular disorder. With respect to cancer, the presence of a relatively high amount of transcript in biopsied tissue from an individual may indicate a predisposition for the development of the disease, or may provide a means for detecting the disease prior to the appearance of actual clinical symptoms. A more definitive diagnosis of this type may allow health professionals to employ preventative measures or aggressive treatment earlier thereby preventing the development or further progression of the cancer.

[0338] Antibodies of the invention can be used to assay protein levels in a biological sample using classical immunohistological methods known to those of skill in the art (e.g., see Jalkanen et al., J. Cell. Biol. 101:976-985 (1985); Jalkanen et al., J. Cell. Biol. 105:3087-3096 (1987)). Other antibody-based methods useful for detecting protein gene expression include immunoassays, such as the enzyme linked immunosorbent assay (ELISA) and the radioimmunoassay (RIA). Suitable antibody assay labels are known in the art and include enzyme labels, such as, glucose oxidase; radioisotopes, such as iodine (125I, 121I ), carbon (14C), sulfur (35S), tritium (3H), indium (112In), and technetium (99Tc); luminescent labels, such as luminol; and fluorescent labels, such as fluorescein and rhodamine, and biotin.

[0339] One facet of the invention is the detection and diagnosis of a disease or disorder associated with aberrant expression of a polypeptide of interest in an animal, preferably a mammal and most preferably a human. A preferred embodiment of the invention is the detection and diagnosis of a disease or disorder of the colon associated with aberrant expression of a colon antigen in an animal, preferably a mammal and most preferably a human. In one embodiment, diagnosis comprises: a) administering (for example, parenterally, subcutaneously, or intraperitoneally) to a subject an effective amount of a labeled molecule which specifically binds to the polypeptide of interest; b) waiting for a time interval following the administering for permitting the labeled molecule to preferentially concentrate at sites in the subject where the polypeptide is expressed (and for unbound labeled molecule to be cleared to background level); c) determining background level; and d) detecting the labeled molecule in the subject, such that detection of labeled molecule above the background level indicates that the subject has a particular disease or disorder associated with aberrant expression of the polypeptide of interest. Background level can be determined by various methods including, comparing the amount of labeled molecule detected to a standard value previously determined for a particular system.

[0340] It will be understood in the art that the size of the subject and the imaging system used will determine the quantity of imaging moiety needed to produce diagnostic images. In the case of a radioisotope moiety, for a human subject, the quantity of radioactivity injected will normally range from about 5 to 20 millicuries of 99 mTc. The labeled antibody or antibody fragment will then preferentially accumulate at the location of cells which contain the specific protein. In vivo tumor imaging is described in S. W. Burchiel et al., “Immunopharmacokinetics of Radiolabeled Antibodies and Their Fragments.” (Chapter 13 in Tumor Imaging: The Radiochemical Detection of Cancer, S. W. Burchiel and B. A. Rhodes, eds., Masson Publishing Inc. (1982)).

[0341] Depending on several variables, including the type of label used and the mode of administration, the time interval following the administration for permitting the labeled molecule to preferentially concentrate at sites in the subject and for unbound labeled molecule to be cleared to background level is 6 to 48 hours or 6 to 24 hours or 6 to 12 hours. In another embodiment the time interval following administration is 5 to 20 days or 5 to 10 days.

[0342] In an embodiment, monitoring of the disease or disorder is carried out by repeating the method for diagnosing the disease or disorder, for example, one month after initial diagnosis, six months after initial diagnosis, one year after initial diagnosis, etc.

[0343] Presence of the labeled molecule can be detected in the patient using methods known in the art for in vivo scanning. These methods depend upon the type of label used. Skilled artisans will be able to determine the appropriate method for detecting a particular label. Methods and devices that may be used in the diagnostic methods of the invention include, but are not limited to, computed tomography (CT), whole body scan such as position emission tomography (PET), magnetic resonance imaging (MRI), and sonography.

[0344] In a specific embodiment, the molecule is labeled with a radioisotope and is detected in the patient using a radiation responsive surgical instrument (Thurston et al., U.S. Pat. No. 5,441,050). In another embodiment, the molecule is labeled with a fluorescent compound and is detected in the patient using a fluorescence responsive scanning instrument. In another embodiment, the molecule is labeled with a positron emitting metal and is detected in the patent using positron emission-tomography. In yet another embodiment, the molecule is labeled with a paramagnetic label and is detected in a patient using magnetic resonance imaging (MRI).

[0345] Kits

[0346] The present invention provides kits that can be used in the above methods. In one embodiment, a kit comprises an antibody of the invention, preferably a purified antibody, in one or more containers. In a specific embodiment, the kits of the present invention contain a substantially isolated polypeptide comprising an epitope which is specifically immunoreactive with an antibody included in the kit. Preferably, the kits of the present invention further comprise a control antibody which does not react with the polypeptide of interest. In another specific embodiment, the kits of the present invention contain a means for detecting the binding of an antibody to a polypeptide of interest (e.g., the antibody may be conjugated to a detectable substrate such as a fluorescent compound, an enzymatic substrate, a radioactive compound or a luminescent compound, or a second antibody which recognizes the first antibody may be conjugated to a detectable substrate).

[0347] In another specific embodiment of the present invention, the kit is a diagnostic kit for use in screening serum containing antibodies specific against proliferative and/or cancerous polynucleotides and polypeptides. Such a kit may include a control antibody that does not react with the polypeptide of interest. Such a kit may include a substantially isolated polypeptide antigen comprising an epitope, which is specifically immunoreactive with at least one anti-polypeptide antigen antibody. Further, such a kit includes means for detecting the binding of said antibody to the antigen (e.g., the antibody may be conjugated to a fluorescent compound such as fluorescein or rhodamine, which can be detected by flow cytometry). In specific embodiments, the kit may include a recombinantly produced or chemically synthesized polypeptide antigen. The polypeptide antigen of the kit may also be attached to a solid support.

[0348] In a more specific embodiment the detecting means of the above-described kit includes a solid support to which said polypeptide antigen is attached. Such a kit may also include a non-attached reporter-labeled anti-human antibody. In this embodiment, binding of the antibody to the polypeptide antigen can be detected by binding of the said reporter-labeled antibody.

[0349] In an additional embodiment, the invention includes a diagnostic kit for use in screening serum containing antigens of the polypeptide of the invention. The diagnostic kit includes a substantially isolated antibody specifically immunoreactive with polypeptide or polynucleotide antigens, and means for detecting the binding of the polynucleotide or polypeptide antigen to the antibody. In one embodiment, the antibody is attached to a solid support. In a specific embodiment, the antibody may be a monoclonal antibody. The detecting means of the kit may include a second, labeled monoclonal antibody. Alternatively, or in addition, the detecting means may include a labeled, competing antigen.

[0350] In one diagnostic configuration, test serum is reacted with a solid phase reagent having a surface-bound antigen obtained by the methods of the present invention. After binding with specific antigen antibody to the reagent and removing unbound serum components by washing, the reagent is reacted with reporter-labeled anti-human antibody to bind reporter to the reagent in proportion to the amount of bound anti-antigen antibody on the solid support. The reagent is again washed to remove unbound labeled antibody, and the amount of reporter associated with the reagent is determined. Typically, the reporter is an enzyme, which is detected by incubating the solid phase in the presence of a suitable fluorometric, luminescent or colorimetric substrate (Sigma, St. Louis, Mo.).

[0351] The solid surface reagent in the above assay is prepared by known techniques for attaching protein material to solid support material, such as polymeric beads, dip sticks, 96-well plate or filter material. These attachment methods generally include non-specific adsorption of the protein to the support or covalent attachment of the protein, typically through a free amine group, to a chemically reactive group on the solid support, such as an activated carboxyl, hydroxyl, or aldehyde group. Alternatively, streptavidin coated plates can be used in conjunction with biotinylated antigen(s).

[0352] Thus, the invention provides an assay system or kit for carrying out this diagnostic method. The kit generally includes a support with surface-bound recombinant antigens, and a reporter-labeled anti-human antibody for detecting surface-bound anti-antigen antibody.

[0353] Uses of the Polynucleotides

[0354] Each of the polynucleotides identified herein can be used in numerous ways as reagents. The following description should be considered exemplary and utilizes known techniques.

[0355] The polynucleotides of the present invention are useful for chromosome identification. There exists an ongoing need to identify new chromosome markers, since few chromosome marking reagents, based on actual sequence data (repeat polymorphisms), are presently available. Each sequence is specifically targeted to and can hybridize with a particular location on an individual human chromosome, thus each polynucleotide of the present invention can routinely be used as a chromosome marker using techniques known in the art. Table 1A, column 8 provides the chromosome location of some of the polynucleotides of the invention.

[0356] Briefly, sequences can be mapped to chromosomes by preparing PCR primers (preferably at least 15 bp (e.g., 15-25 bp) from the sequences shown in SEQ ID NO:X. Primers can optionally be selected using computer analysis so that primers do not span more than one predicted exon in the genomic DNA. These primers are then used for PCR screening of somatic cell hybrids containing individual human chromosomes. Only those hybrids containing the human gene corresponding to SEQ ID NO:X will yield an amplified fragment.

[0357] Similarly, somatic hybrids provide a rapid method of PCR mapping the polynucleotides to particular chromosomes. Three or more clones can be assigned per day using a single thermal cycler. Moreover, sublocalization of the polynucleotides can be achieved with panels of specific chromosome fragments. Other gene mapping strategies that can be used include in situ hybridization, prescreening with labeled flow-sorted chromosomes, preselection by hybridization to construct chromosome specific-cDNA libraries, and computer mapping techniques (See, e.g., Shuler, Trends Biotechnol 16:456-459 (1998) which is hereby incorporated by reference in its entirety).

[0358] Precise chromosomal location of the polynucleotides can also be achieved using fluorescence in situ hybridization (FISH) of a metaphase chromosomal spread. This technique uses polynucleotides as short as 500 or 600 bases; however, polynucleotides 2,000-4,000 bp are preferred. For a review of this technique, see Verma et al., “Human Chromosomes: a Manual of Basic Techniques,” Pergamon Press, New York (1988).

[0359] For chromosome mapping, the polynucleotides can be used individually (to mark a single chromosome or a single site on that chromosome) or in panels (for marking multiple sites and/or multiple chromosomes).

[0360] Thus, the present invention also provides a method for chromosomal localization which involves (a) preparing PCR primers from the polynucleotide sequences in Table 1A and/or Table 2 and SEQ ID NO:X and (b) screening somatic cell hybrids containing individual chromosomes.

[0361] The polynucleotides of the present invention would likewise be useful for radiation hybrid mapping, HAPPY mapping, and long range restriction mapping. For a review of these techniques and others known in the art, see, e.g. Dear, “Genome Mapping: A Practical Approach,” IRL Press at Oxford University Press, London 7); Aydin, J. Mol. Med. 77:691-694 (1999); Hacia et al., Mol. Psychiatry 3:483-492 (1998); Herrick et al., Chromosome Res. 7:409-423 (1999); Hamilton et al., Methods Cell Biol. 62:265-280 (2000); and/or Ott, J. Hered. 90:68-70 (1999), each of which is hereby incorporated by reference in its entirety.

[0362] Once a polynucleotide has been mapped to a precise chromosomal location, the physical position of the polynucleotide can be used in linkage analysis. Linkage analysis establishes coinheritance between a chromosomal location and presentation of a particular disease. (Disease mapping data are found, for example, in V. McKusick, Mendelian Inheritance in Man (available on line through Johns Hopkins University Welch Medical Library).) Column 9 of Table 1A provides an OMIM reference identification number of diseases associated with the cytologic band disclosed in column 8 of Table 1A, as determined using techniques described herein and by reference to Table 5. Assuming 1 megabase mapping resolution and one gene per 20 kb, a cDNA precisely localized to a chromosomal region associated with the disease could be one of 50-500 potential causative genes.

[0363] Thus, once coinheritance is established, differences in a polynucleotide of the invention and the corresponding gene between affected and unaffected individuals can be examined. First, visible structural alterations in the chromosomes, such as deletions or translocations, are examined in chromosome spreads or by PCR. If no structural alterations exist, the presence of point mutations are ascertained. Mutations observed in some or all affected individuals, but not in normal individuals, indicate that the mutation may cause the disease. However, complete sequencing of the polypeptide and the corresponding gene from several normal individuals is required to distinguish the mutation from a polymorphism. If a new polymorphism is identified, this polymorphic polypeptide can be used for further linkage analysis.

[0364] Furthermore, increased or decreased expression of the gene in affected individuals as compared to unaffected individuals can be assessed using the polynucleotides of the invention. Any of these alterations (altered expression, chromosomal rearrangement, or mutation) can be used as a diagnostic or prognostic marker. Diagnostic and prognostic methods, kits and reagents encompassed by the present invention are briefly described below and more thoroughly elsewhere herein (see e.g., the sections labeled “Antibodies”, “Diagnostic Assays”, and “Methods for Detecting Colon Disease, Including Cancer”).

[0365] Thus, the invention also provides a diagnostic method useful during diagnosis of a disorder, involving measuring the expression level of polynucleotides of the present invention in cells or body fluid from an individual and comparing the measured gene expression level with a standard level of polynucleotide expression level, whereby an increase or decrease in the gene expression level compared to the standard is indicative of a disorder. Additional non-limiting examples of diagnostic methods encompassed by the present invention are more thoroughly described elsewhere herein (see, e.g., Example 12).

[0366] In still another embodiment, the invention includes a kit for analyzing samples for the presence of proliferative and/or cancerous polynucleotides derived from a test subject, as further described herein. In a general embodiment, the kit includes at least one polynucleotide probe containing a nucleotide sequence that will specifically hybridize with a polynucleotide of the invention and a suitable container. In a specific embodiment, the kit includes two polynucleotide probes defining an internal region of the polynucleotide of the invention, where each probe has one strand containing a 31′mer-end internal to the region. In a further embodiment, the probes may be useful as primers for polymerase chain reaction amplification.

[0367] Where a diagnosis of a related disorder, including, for example, diagnosis of a tumor, has already been made according to conventional methods, the present invention is useful as a prognostic indicator, whereby patients exhibiting enhanced or depressed polynucleotide of the invention expression will experience a worse clinical outcome relative to patients expressing the gene at a level nearer the standard level.

[0368] By “measuring the expression level of polynucleotides of the invention” is intended qualitatively or quantitatively measuring or estimating the level of the polypeptide of the invention or the level of the mRNA encoding the polypeptide of the invention in a first biological sample either directly (e.g., by determining or estimating absolute protein level or mRNA level) or relatively (e.g., by comparing to the polypeptide level or mRNA level in a second biological sample). Preferably, the polypeptide level or mRNA level in the first biological sample is measured or estimated and compared to a standard polypeptide level or mRNA level, the standard being taken from a second biological sample obtained from an individual not having the related disorder or being determined by averaging levels from a population of individuals not having a related disorder. As will be appreciated in the art, once a standard polypeptide level or mRNA level is known, it can be used repeatedly as a standard for comparison.

[0369] By “biological sample” is intended any biological sample obtained from an individual, body fluid, cell line, tissue culture, or other source which contains polypeptide of the present invention or the corresponding mRNA. As indicated, biological samples include body fluids (such as semen, lymph, vaginal pool, sera, plasma, urine, synovial fluid and spinal fluid) which contain the polypeptide of the present invention, and tissue sources found to express the polypeptide of the present invention. Methods for obtaining tissue biopsies and body fluids from mammals are well known in the art. Where the biological sample is to include mRNA, a tissue biopsy is the preferred source.

[0370] The method(s) provided above may preferably be applied in a diagnostic method and/or kits in which polynucleotides and/or polypeptides of the invention are attached to a solid support. In one exemplary method, the support may be a “gene chip” or a “biological chip” as described in U.S. Pat. Nos. 5,837,832, 5,874,219, and 5,856,174. Further, such a gene chip with polynucleotides of the invention attached may be used to identify polymorphisms between the isolated polynucleotide sequences of the invention, with polynucleotides isolated from a test subject. The knowledge of such polymorphisms (i.e., their location, as well as, their existence) would be beneficial in identifying disease loci for many disorders, such as for example, in neural disorders, immune system disorders, muscular disorders, reproductive disorders, gastrointestinal disorders, pulmonary disorders, digestive disorders, cardiovascular disorders, renal disorders, proliferative disorders, and/or cancerous diseases and conditions. Such a method is described in U.S. Pat. Nos. 5,858,659 and 5,856,104. The U.S. patents referenced supra are hereby incorporated by reference in their entirety herein.

[0371] The present invention encompasses polynucleotides of the present invention that are chemically synthesized, or reproduced as peptide nucleic acids (PNA), or according to other methods known in the art. The use of PNAs would serve as the preferred form if the polynucleotides of the invention are incorporated onto a solid support, or gene chip. For the purposes of the present invention, a peptide nucleic acid (PNA) is a polyamide type of DNA analog and the monomeric units for adenine, guanine, thymine and cytosine are available commercially (Perceptive Biosystems). Certain components of DNA, such as phosphorus, phosphorus oxides, or deoxyribose derivatives, are not present in PNAs. As disclosed by Nielsen et al., Science 254:1497 (1991); and Egholm et al., Nature 365:666 (1993), PNAs bind specifically and tightly to complementary DNA strands and are not degraded by nucleases. In fact, PNA binds more strongly to DNA than DNA itself does. This is probably because there is no electrostatic repulsion between the two strands, and also the polyamide backbone is more flexible. Because of this, PNA/DNA duplexes bind under a wider range of stringency conditions than DNA/DNA duplexes, making it easier to perform multiplex hybridization. Smaller probes can be used than with DNA due to the strong binding. In addition, it is more likely that single base mismatches can be determined with PNA/DNA hybridization because a single mismatch in a PNA/DNA 1 5-mer lowers the melting point (T.sub.m) by 8°-20° C., vs. 4°-16° C. for the DNA/DNA 15-mer duplex. Also, the absence of charge groups in PNA means that hybridization can be done at low ionic strengths and reduce possible interference by salt during the analysis.

[0372] The compounds of the present invention have uses which include, but are not limited to, detecting cancer in mammals. In particular the invention is useful during diagnosis of pathological cell proliferative neoplasias which include, but are not limited to: acute myelogenous leukemias including acute monocytic leukemia, acute myeloblastic leukemia, acute promyelocytic leukemia, acute myelomonocytic leukemia, acute erythroleukemia, acute megakaryocytic leukemia, and acute undifferentiated leukemia, etc.; and chronic myelogenous leukemias including chronic myelomonocytic leukemia, chronic granulocytic leukemia, etc. Preferred mammals include monkeys, apes, cats, dogs, cows, pigs, horses, rabbits and humans. Particularly preferred are humans.

[0373] The compounds of the present invention have preferred uses which include, but are not limited to, detecting colon cancer in mammals. In particular the invention is useful during diagnosis of pathological cell proliferative neoplasias, which include, but are not limited to: rectal cancer, adenocarcinoma, colorectal carcinoma, colon cancer, colon carcinoma, colorectal cancer, and/or as described under “Gastrointestinal Disorders” below. Preferred mammals include monkeys, apes, cats, dogs, cows, pigs, horses, rabbits and humans. Particularly preferred are humans.

[0374] Pathological cell proliferative disorders are often associated with inappropriate activation of proto-oncogenes. (Gelmann, E. P. et al., “The Etiology of Acute Leukemia: Molecular Genetics and Viral Oncology,” in Neoplastic Diseases of the Blood, Vol 1., Wiemik, P. H. et al. eds., 161-182 (1985)). Neoplasias are now believed to result from the qualitative alteration of a normal cellular gene product, or from the quantitative modification of gene expression by insertion into the chromosome of a viral sequence, by chromosomal translocation of a gene to a more actively transcribed region, or by some other mechanism. (Gelmann et al., supra) It is likely that mutated or altered expression of specific genes is involved in the pathogenesis of some leukemias, among other tissues and cell types. (Gelmann et al., supra) Indeed, the human counterparts of the oncogenes involved in some animal neoplasias have been amplified or translocated in some cases of human leukemia and carcinoma. (Gelmann et al., supra).

[0375] For example, c-myc expression is highly amplified in the non-lymphocytic leukemia cell line HL-60. When HL-60 cells are chemically induced to stop proliferation, the level of c-myc is found to be downregulated. (International Publication Number WO 91/15580). However, it has been shown that exposure of HL-60 cells to a DNA construct that is complementary to the 5′ end of c-myc or c-myb blocks translation of the corresponding mRNAs which downregulates expression of the c-myc or c-myb proteins and causes arrest of cell proliferation and differentiation of the treated cells. (International Publication Number WO 91/15580; Wickstrom et al., Proc. Natl. Acad. Sci. 85:1028 (1988); Anfossi et al., Proc. Natl. Acad. Sci. 86:3379 (1989)). However, the skilled artisan would appreciate the present invention's usefulness is not be limited to treatment, prevention, diagnosis and/or prognosis, of proliferative disorders of cells and tissues of hematopoietic origin, in light of the numerous cells and cell types of varying origins which are known to exhibit proliferative phenotypes. In preferred embodiments, the compounds and/or methods of the invention are used to treat, prevent, diagnose, and/or prognose, proliferative disorders of colon cells and tissues.

[0376] In addition to the foregoing, a polynucleotide of the present invention can be used to control gene expression through triple helix formation or through antisense DNA or RNA. Antisense techniques are discussed, for example, in Okano, J. Neurochem. 56: 560 (1991); “Oligodeoxynucleotides as Antisense Inhibitors of Gene Expression, CRC Press, Boca Raton, Fla. (1988). Triple helix formation is discussed in, for instance Lee et al., Nucleic Acids Research 6: 3073 (1979); Cooney et al., Science 241: 456 (1988); and Dervan et al., Science 251: 1360 (1991). Both methods rely on binding of the polynucleotide to a complementary DNA or RNA. For these techniques, preferred polynucleotides are usually oligonucleotides 20 to 40 bases in length and complementary to either the region of the gene involved in transcription (triple helix—see Lee et al., Nucl. Acids Res. 6:3073 (1979); Cooney et al., Science 241:456 (1988); and Dervan et al., Science 251:1360 (1991)) or to the mRNA itself (antisense—Okano, J. Neurochem. 56:560 (1991); Oligodeoxy-nucleotides as Antisense Inhibitors of Gene Expression, CRC Press, Boca Raton, Fla. (1988).) Triple helix formation optimally results in a shut-off of RNA transcription from DNA, while antisense RNA hybridization blocks translation of an mRNA molecule into polypeptide. The oligonucleotide described above can also be delivered to cells such that the antisense RNA or DNA may be expressed in vivo to inhibit production of polypeptide of the present invention antigens. Both techniques are effective in model systems, and the information disclosed herein can be used to design antisense or triple helix polynucleotides in an effort to treat disease, and in particular, for the treatment of proliferative diseases and/or conditions. Non-limiting antisense and triple helix methods encompassed by the present invention are more thoroughly described elsewhere herein (see, e.g., the section labeled “Antisense and Ribozyme (Antagonists)”).

[0377] Polynucleotides of the present invention are also useful in gene therapy. One goal of gene therapy is to insert a normal gene into an organism having a defective gene, in an effort to correct the genetic defect. The polynucleotides disclosed in the present invention offer a means of targeting such genetic defects in a highly accurate manner. Another goal is to insert a new gene that was not present in the host genome, thereby producing a new trait in the host cell. Additional non-limiting examples of gene therapy methods encompassed by the present invention are more thoroughly described elsewhere herein (see, e.g., the sections labeled “Gene Therapy Methods” and Examples 16, 17 and 18).

[0378] The polynucleotides are also useful for identifying individuals from minute biological samples. The United States military, for example, is considering the use of restriction fragment length polymorphism (RFLP) for identification of its personnel. In this technique, an individual's genomic DNA is digested with one or more restriction enzymes, and probed on a Southern blot to yield unique bands for identifying personnel. This method does not suffer from the current limitations of “Dog Tags” which can be lost, switched, or stolen, making positive identification difficult. The polynucleotides of the present invention can be used as additional DNA markers for RFLP.

[0379] The polynucleotides of the present invention can also be used as an alternative to RFLP, by determining the actual base-by-base DNA sequence of selected portions of an individual's genome. These sequences can be used to prepare PCR primers for amplifying and isolating such selected DNA, which can then be sequenced. Using this technique, individuals can be identified because each individual will have a unique set of DNA sequences. Once an unique ID database is established for an individual, positive identification of that individual, living or dead, can be made from extremely small tissue samples.

[0380] Forensic biology also benefits from using DNA-based identification techniques as disclosed herein. DNA sequences taken from very small biological samples such as tissues, e.g., hair or skin, or body fluids, e.g., blood, saliva, semen, synovial fluid, amniotic fluid, breast milk, lymph, pulmonary sputum or surfactant, urine, fecal matter, etc., can be amplified using PCR. In one prior art technique, gene sequences amplified from polymorphic loci, such as DQa class II HLA gene, are used in forensic biology to identify individuals. (Erlich, H., PCR Technology, Freeman and Co. (1992).) Once these specific polymorphic loci are amplified, they are digested with one or more restriction enzymes, yielding an identifying set of bands on a Southern blot probed with DNA corresponding to the DQa class II HLA gene. Similarly, polynucleotides of the present invention can be used as polymorphic markers for forensic purposes.

[0381] There is also a need for reagents capable of identifying the source of a particular tissue. Such need arises, for example, in forensics when presented with tissue of unknown origin. Appropriate reagents can comprise, for example, DNA probes or primers prepared from the sequences of the present invention, specific to tissues, including but not limited to, those sequences referred to in Table 1A. Panels of such reagents can identify tissue by species and/or by organ type. In a similar fashion, these reagents can be used to screen tissue cultures for contamination. Additional non-limiting examples of such uses are further described herein.

[0382] Because colon antigens are found expressed in the colon, the polynucleotides of the present invention are also useful as hybridization probes for differential identification of the tissue(s) or cell type(s) present in a biological sample. Similarly, polypeptides and antibodies directed to polypeptides of the present invention are useful to provide immunological probes for differential identification of the tissue(s) (e.g., immunohistochemistry assays) or cell type(s) (e.g., immunocytochemistry assays). In a specific embodiment, the polynucleotides of the present invention are also useful as hybridization probes for differential identification of colon tissue(s) or cell type(s) present in a biological sample. Similarly, polypeptides and antibodies directed to polypeptides of the present invention are useful to provide immunological probes for differential identification of colon tissue(s) (e.g., immunohistochemistry assays) or cell type(s) (e.g., immunocytochemistry assays). In addition, for a number of disorders of the above tissues or cells, significantly higher or lower levels of gene expression of the polynucleotides/polypeptides of the present invention may be detected in certain tissues (e.g., tissues expressing polypeptides and/or polynucleotides of the present invention, for example, normal colon or diseased colon tissues, and/or those tissues/cells corresponding to the library source relating to a polynucleotide sequence of the invention as disclosed in column 7 of Table 1A, and/or cancerous and/or wounded tissues) or bodily fluids (e.g., semen, lymph, vaginal pool, serum, plasma, urine, synovial fluid or spinal fluid) taken from an individual having such a disorder, relative to a “standard” gene expression level, i.e., the expression level in healthy tissue from an individual not having the disorder.

[0383] Thus, the invention provides a diagnostic method of a disorder, which involves: (a) assaying gene expression level in cells or body fluid of an individual; (b) comparing the gene expression level with a standard gene expression level, whereby an increase or decrease in the assayed gene expression level compared to the standard expression level is indicative of a disorder.

[0384] In the very least, the polynucleotides of the present invention can be used as molecular weight markers on Southern gels, as diagnostic probes for the presence of a specific mRNA in a particular cell type, as a probe to “subtract-out” known sequences in the process of discovering novel polynucleotides, for selecting and making oligomers for attachment to a “gene chip” or other support, to raise anti-DNA antibodies using DNA immunization techniques, and as an antigen to elicit an immune response.

[0385] Uses of the Polypeptides

[0386] Each of the polypeptides identified herein can be used in numerous ways. The following description should be considered exemplary and utilizes known techniques.

[0387] Polypeptides and antibodies directed to polypeptides of the present invention are useful to provide immunological probes for differential identification of the tissue(s) (e.g., immunohistochemistry assays such as, for example, ABC immunoperoxidase (Hsu et al., J. Histochem. Cytochem. 29:577-580 (1981)) or cell type(s) (e.g., immunocytochemistry assays).

[0388] Antibodies can be used to assay levels of polypeptides encoded by polynucleotides of the invention in a biological sample using classical immunohistological methods known to those of skill in the art (see, e.g., Jalkanen, et al., J. Cell. Biol. 101:976-985 (1985); Jalkanen, et al., J. Cell. Biol. 105:3087-3096 (1987)). Other antibody-based methods useful for detecting protein gene expression include immunoassays, such as the enzyme linked immunosorbent assay (ELISA) and the radioimmunoassay (RIA). Suitable antibody assay labels are known in the art and include enzyme labels, such as, glucose oxidase; radioisotopes, such as iodine (¹³¹I, ¹²⁵I, ¹²³I, ¹²¹I), carbon (¹⁴C), sulfur (³⁵S), tritium (³H), indium (^{115m}In, ^{113m}In, ¹¹²In, ¹¹¹In), and technetium (⁹⁹Tc, ^{99m}Tc), thallium (²⁰¹Ti), gallium (⁶⁸Ga, ⁶⁷Ga), palladium (¹⁰³Pd), molybdenum (⁹⁹Mo), xenon (¹³³Xe), fluorine (¹⁸F), ¹⁵³Sm, ¹⁷⁷Lu, ¹⁵⁹Gd, ¹⁴⁹Pm, 140La, ¹⁷⁵Yb, ¹⁶⁶Ho, ⁹⁰Y, ⁴⁷SC, ¹⁸⁶Re, ¹⁸⁸Re, ¹⁴²Pr, ¹⁰⁵Rh, ⁹⁷Ru; luminescent labels, such as luminol; and fluorescent labels, such as fluorescein and rhodamine, and biotin.

[0389] In addition to assaying levels of polypeptide of the present invention in a biological sample, proteins can also be detected in vivo by imaging. Antibody labels or markers for in vivo imaging of protein include those detectable by X-radiography, NMR or ESR. For X-radiography, suitable labels include radioisotopes such as barium or cesium, which emit detectable radiation but are not overtly harmful to the subject. Suitable markers for NMR and ESR include those with a detectable characteristic spin, such as deuterium, which may be incorporated into the antibody by labeling of nutrients for the relevant hybridoma.

[0390] A colon antigen-specific antibody or antibody fragment which has been labeled with an appropriate detectable imaging moiety, such as a radioisotope (for example, ¹³¹I, ¹¹²In, ^{99m}Tc, (¹³¹I, ¹²⁵I, 123I, ¹²¹I), carbon (¹⁴C), sulfur (35S), tritium (³ H), indium (^{151m}In, ^{113m}In, ¹¹²In, ¹¹¹In), and technetium (⁹⁹Tc, ^{99m}Tc), thallium (²⁰¹Ti), gallium (⁶⁸Ga, ⁶⁷Ga), palladium (¹⁰³Pd), molybdenum (⁹⁹Mo), xenon (¹³³Xe), fluorine (¹⁸F, ¹⁵³Sm, ¹⁷⁷Lu, ¹⁵⁹Gd, ¹⁴⁹Pm, ¹⁴⁰La, ¹⁷⁵Yb, ¹⁶⁶Ho, ⁹⁰Y, ⁴⁷Sc, ¹⁸⁶Re, ¹⁸⁸Re, ¹⁴²Pr, ¹⁰⁵Rh, ⁹⁷Ru), a radio-opaque substance, or a material detectable by nuclear magnetic resonance, is introduced (for example, parenterally, subcutaneously or intraperitoneally) into the mammal to be examined for a colon disorder. It will be understood in the art that the size of the subject and the imaging system used will determine the quantity of imaging moiety needed to produce diagnostic images. In the case of a radioisotope moiety, for a human subject, the quantity of radioactivity injected will normally range from about 5 to 20 millicuries of ^{99m}Tc. The labeled antibody or antibody fragment will then preferentially accumulate at the location of cells which express the polypeptide encoded by a polynucleotide of the invention. In vivo tumor imaging is described in S. W. Burchiel et al., “Immunopharmacokinetics of Radiolabeled Antibodies and Their Fragments” (Chapter 13 in Tumor Imaging: The Radiochemical Detection of Cancer, S. W. Burchiel and B. A. Rhodes, eds., Masson Publishing Inc. (1982)).

[0391] In one embodiment, the invention provides a method for the specific delivery of compositions of the invention to cells by administering polypeptides of the invention (e.g., polypeptides encoded by polynucleotides of the invention and/or antibodies) that are associated with heterologous polypeptides or nucleic acids. In one example, the invention provides a method for delivering a therapeutic protein into the targeted cell. In another example, the invention provides a method for delivering a single stranded nucleic acid (e.g., antisense or ribozymes) or double stranded nucleic acid (e.g., DNA that can integrate into the cell's genome or replicate episomally and that can be transcribed) into the targeted cell.

[0392] In another embodiment, the invention provides a method for the specific destruction of cells (e.g., the destruction of tumor cells) by administering polypeptides of the invention in association with toxins or cytotoxic prodrugs.

[0393] In a preferred embodiment, the invention provides a method for the specific destruction of colon cells (e.g., aberrant colon cells, colon neoplasm) by administering polypeptides of the invention (e.g., polypeptides encoded by polynucleotides of the invention and/or antibodies) in association with toxins or cytotoxic prodrugs. In another preferred embodiment the invention provides a method for the specific destruction of tissues/cells corresponding to the library source relating to a polynucleotide sequence of the invention as disclosed in column 7 of Table 1A by administering polypeptides of the invention in association with toxins or cytotoxic prodrugs.

[0394] By “toxin” is meant one or more compounds that bind and activate endogenous cytotoxic effector systems, radioisotopes, holotoxins, modified toxins, catalytic subunits of toxins, or any molecules or enzymes not normally present in or on the surface of a cell that under defined conditions cause the cell's death. Toxins that may be used according to the methods of the invention include, but are not limited to, radioisotopes known in the art, compounds such as, for example, antibodies (or complement fixing containing portions thereof) that bind an inherent or induced endogenous cytotoxic effector system, thymidine kinase, endonuclease, RNAse, alpha toxin, ricin, abrin, Pseudomonas exotoxin A, diphtheria toxin, saporin, momordin, gelonin, pokeweed antiviral protein, alpha-sarcin and cholera toxin. “Toxin” also includes a cytostatic or cytocidal agent, a therapeutic agent or a radioactive metal ion, e.g., alpha-emitters such as, for example, ²¹³Bi, or other radioisotopes such as, for example, ¹⁰³Pd, ¹³³Xe, ¹³¹I, ¹¹¹In, ⁶⁸Ge, ⁵⁷Co, ⁶⁵Zn, ⁸⁵Sr, ³²P, ³⁵S, ⁹⁰Y, ¹⁵³Sm, ¹⁵³Gd, ¹⁶⁹Yb, ⁵¹Cr, ⁵⁴Mn, ⁷⁵Se, ¹¹³Sn, ⁹⁰Yttrium, ¹¹⁷Tin, ¹⁸⁶Rhenium, ¹⁶⁶Holmium, and ¹⁸⁸Rhenium; luminescent labels, such as luminol; and fluorescent labels, such as fluorescein and rhodamine, and biotin.

[0395] In a specific embodiment, the invention provides a method for the specific destruction of cells (e.g., the destruction of tumor cells) by administering polypeptides of the invention or antibodies of the invention in association with the radioisotope ⁹⁰Y. In another specific embodiment, the invention provides a method for the specific destruction of cells (e.g., the destruction of tumor cells) by administering polypeptides of the invention or antibodies of the invention in association with the radioisotope ¹¹¹In. In a further specific embodiment, the invention provides a method for the specific destruction of cells (e.g., the destruction of tumor cells) by administering polypeptides of the invention or antibodies of the invention in association with the radioisotope 131I.

[0396] Techniques known in the art may be applied to label polypeptides of the invention (including antibodies). Such techniques include, but are not limited to, the use of bifunctional conjugating agents (see e.g., U.S. Pat. Nos. 5,756,065; 5,714,631; 5,696,239; 5,652,361; 5,505,931; 5,489,425; 5,435,990; 5,428,139; 5,342,604; 5,274,119; 4,994,560; and 5,808,003; the contents of each of which are hereby incorporated by reference in its entirety).

[0397] Thus, the invention provides a diagnostic method of a disorder, which involves (a) assaying the expression level of a polypeptide of the present invention in cells or body fluid of an individual; and (b) comparing the assayed polypeptide expression level with a standard polypeptide expression level, whereby an increase or decrease in the assayed polypeptide expression level compared to the standard expression level is indicative of a disorder. With respect to cancer, the presence of a relatively high amount of transcript in biopsied tissue from an individual may indicate a predisposition for the development of the disease, or may provide a means for detecting the disease prior to the appearance of actual clinical symptoms. A more definitive diagnosis of this type may allow health professionals to employ preventative measures or aggressive treatment earlier thereby preventing the development or further progression of the cancer.

[0398] Moreover, polypeptides of the present invention can be used to treat or prevent diseases or conditions of the colon such as, for example, congenital abnormalities, such as atresia and stenosis, Meckel diverticulum, congential aganglionic megacolon or Hirschsprung disease; colonic diverticulitis, colonic diverticulosis, toxic megacolon, constipation, disorders caused by parasites and protozoa (e.g., amoebic colitis, anisakiasis, balantidiasis, blastocystis infections, cryptosporidiosis, dientamoebiasis, amoebic dysentery, giardiasis, Lymphopathia venereum, Entamoeba histolytica), bacteria infection (e.g., Shigella, Salmonella, Yersinia, E. coli, Clostridium difficile), viral infection (e.g., cytomegalic virus, rotovirus); inflammatory bowel disease (e.g., ulcerative colitis, Crohn's disease, eosinophilic colitis); neoplastic disorders, such as, polyps (e.g., sessile polyp, adenomatous polyp, inflammatory polyps), adenomas (e.g., tubular adenoma, tubovillous adenomas, villous adenoma, Gardner syndrome, Peutz-Jeghers syndrome), hyperplastic, polyposis, villous, pseudopolyps, leiomyomas, carcinoids, lipomas, and angiomas, cancers, such as, rectal cancer, adenocarcinoma, colorectal carcinoma, colon cancer, colon carcinoma, colorectal cancer; colonic diseases); miscellaneous intestinal inflammatory disorders, including acquired immunodeficiency syndrome, HIV enteropathy, transplantation, drug-induced intestinal injury, radiation enterocolitis, neutropenic colitis, diverticular colon disease (DCD), inflammatory colonic disease, ischemic colitis, radiation proctitis, non-inflammatory bowel disease (non-IBD), colonic inflammation; colitis (e.g., infectious enterocolitis, necrotizing enterocolitis, antibiotic-associated colitis (pseudomembranous colitis), and collagenous and lymphocytic colitis); diarrhea and dysentary, malabsorption syndromes (e.g., blind loop syndrome, lactose intolerance, short bowl syndrome, whipple's disease), mesenteric vascular occlusion, pneumatosis cystoides intestinalis, protein-losing enteropathies (intestinal lymphagiectasis); intestinal obstruction (e.g., afferent loop syndrome, impacted feces, intestinal pseudo-obstruction [cecal volvulus], intussusception), intestinal perforation, sigmoid diseases (e.g., proctocolitis, sigmoin neoplasms), and/or as described under “Gastrointestinal Disorders” below. In preferred embodiments, polynucleotides expressed in a particular tissue type (see, e.g., Table 1A, column 7) are used to diagnose, detect, prevent, treat and/or prognose disorders associated with the tissue type. For example, patients can be administered a polypeptide of the present invention in an effort to replace absent or decreased levels of the polypeptide (e.g., insulin), to supplement absent or decreased levels of a different polypeptide (e.g., hemoglobin S for hemoglobin B, SOD, catalase, DNA repair proteins), to inhibit the activity of a polypeptide (e.g., an oncogene or tumor supressor), to activate the activity of a polypeptide (e.g., by binding to a receptor), to reduce the activity of a membrane bound receptor by competing with it for free ligand (e.g., soluble TNF receptors used in reducing inflammation), or to bring about a desired response (e.g., blood vessel growth inhibition, enhancement of the immune response to proliferative cells or tissues).

[0399] Similarly, antibodies directed to a polypeptide of the present invention can also be used to treat disease (as described supra, and elsewhere herein). For example, administration of an antibody directed to a polypeptide of the present invention can bind, and/or neutralize the polypeptide, and/or reduce overproduction of the polypeptide. Similarly, administration of an antibody can activate the polypeptide, such as by binding to a polypeptide bound to a membrane (receptor).

[0400] At the very least, the polypeptides of the present invention can be used as molecular weight markers on SDS-PAGE gels or on molecular sieve gel filtration columns using methods well known to those of skill in the art. Polypeptides can also be used to raise antibodies, which in turn are used to measure protein expression from a recombinant cell, as a way of assessing transformation of the host cell. Moreover, the polypeptides of the present invention can be used to test the biological activities described herein.

[0401] Diagnostic Asssays

[0402] The compounds of the present invention are useful for diagnosis, treatment, prevention and/or prognosis of various colon related disorders in mammals, preferably humans. Such disorders include, but are not limited to, congenital abnormalities, such as atresia and stenosis, Meckel diverticulum, congential aganglionic megacolon or Hirschsprung disease; colonic diverticulitis, colonic diverticulosis, toxic megacolon, constipation, disorders caused by parasites and protozoa (e.g., amoebic colitis, anisakiasis, balantidiasis, blastocystis infections, cryptosporidiosis, dientamoebiasis, amoebic dysentery, giardiasis, Lymphopathia venereum, Entamoeba histolytica), bacteria infection (e.g., Shigella, Salmonella, Yersinia, E. coli, Clostridium difficile), viral infection (e.g., cytomegalic virus, rotovirus); inflammatory bowel disease (e.g., ulcerative colitis, Crohn's disease, eosinophilic colitis); neoplastic disorders, such as, polyps (e.g., sessile polyp, adenomatous polyp, inflammatory polyps), adenomas (e.g., tubular adenoma, tubovillous adenomas, villous adenoma, Gardner syndrome, Peutz-Jeghers syndrome), hyperplastic, polyposis, villous, pseudopolyps, leiomyomas, carcinoids, lipomas, and angiomas, cancers, such as, rectal cancer, adenocarcinoma, colorectal carcinoma, colon cancer, colon carcinoma, colorectal cancer; colonic diseases); miscellaneous intestinal inflammatory disorders, including acquired immunodeficiency syndrome, HIV enteropathy, transplantation, drug-induced intestinal injury, radiation enterocolitis, neutropenic colitis, diverticular colon disease (DCD), inflammatory colonic disease, ischemic colitis, radiation proctitis, non-inflammatory bowel disease (non-IBD), colonic inflammation; colitis (e.g., infectious enterocolitis, necrotizing enterocolitis, antibiotic-associated colitis (pseudomembranous colitis), and collagenous and lymphocytic colitis); diarrhea and dysentary, malabsorption syndromes (e.g., blind loop syndrome, lactose intolerance, short bowl syndrome, whipple's disease), mesenteric vascular occlusion, pneumatosis cystoides intestinalis, protein-losing enteropathies (intestinal lymphagiectasis); intestinal obstruction (e.g., afferent loop syndrome, impacted feces, intestinal pseudo-obstruction [cecal volvulus], intussusception), intestinal perforation, sigmoid diseases (e.g., proctocolitis, sigmoin neoplasms), and/or as described under “Gastrointestinal Disorders” below. In preferred embodiments, polynucleotides expressed in a particular tissue type (see, e.g., Table 1A, column 7) are used to diagnose, detect, prevent, treat and/or prognose disorders associated with the tissue type.

[0403] Colon antigens are expressed in the colon. For a number of colon-related disorders, substantially altered (increased or decreased) levels of colon antigen gene expression can be detected in colon tissue or other cells or bodily fluids (e.g., sera, plasma, urine, semen, synovial fluid or spinal fluid) taken from an individual having such a disorder, relative to a “standard” colon antigen gene expression level, that is, the colon antigen expression level in colon tissues or bodily fluids from an individual not having the colon disorder. Thus, the invention provides a diagnostic method useful during diagnosis of a colon disorder, which involves measuring the expression level of the gene encoding the colon associated polypeptide in colon tissue or other cells or body fluid from an individual and comparing the measured gene expression level with a standard colon antigens gene expression level, whereby an increase or decrease in the gene expression level(s) compared to the standard is indicative of an colon disorder.

[0404] In specific embodiments, the invention provides a diagnostic method useful during diagnosis of a disorder of a normal or diseased tissue/cell source corresponding to column 7 of Table 1A, which involves measuring the expression level of the coding sequence of a polynucleotide sequence associated with this tissue/cell source as disclosed in Table 1A in the tissue/cell source or other cells or body fluid from an individual and comparing the expression level of the coding sequence with a standard expression level of the coding sequence of a polynucleotide sequence, whereby an increase or decrease in the gene expression level(s) compared to the standard is indicative of a disorder of a normal or diseased tissue/cell source corresponding to column 7 of Table 1A.

[0405] In particular, it is believed that certain tissues in mammals with cancer of cells or tissue of the colon express significantly enhanced or reduced levels of normal or altered colon antigen expression and mRNA encoding the colon associated polypeptide when compared to a corresponding “standard” level. Further, it is believed that enhanced or depressed levels of the colon associated polypeptide can be detected in certain body fluids (e.g., sera, plasma, urine, and spinal fluid) or cells or tissue from mammals with such a cancer when compared to sera from mammals of the same species not having the cancer.

[0406] For example, as disclosed herein, colon associated polypeptides of the invention are expressed in the colon. Accordingly, polynucleotides of the invention (e.g., polynucleotide sequences complementary to all or a portion of a colon antigen mRNA nucleotide sequence of SEQ ID NO:X, nucleotide sequence encoding SEQ ID NO:Y, nucleotide sequence encoding a polypeptide encoded by SEQ ID NO:X and/or a nucleotide sequence delineated by columns 8 and 9 of Table 2) and antibodies (and antibody fragments) directed against the polypeptides of the invention may be used to quantitate or qualitate concentrations of cells of the colon expressing colon antigens, preferrably on their cell surfaces. These polynucleotides and antibodies additionally have diagnostic applications in detecting abnormalities in the level of colon antigens gene expression, or abnormalities in the structure and/or temporal, tissue, cellular, or subcellular location of colon antigens. These diagnostic assays may be performed in vivo or in vitro, such as, for example, on blood samples, biopsy tissue or autopsy tissue. In specific embodiments, polynucleotides and antibodies of the invention are used to quantitate or qualitate tissues/cells corresponding to the library source disclosed in column 7 of Table 1A expressing the corresponding colon sequence disclosed in the same row of Table 1A, preferrably on their cell surface.

[0407] Thus, the invention provides a diagnostic method useful during diagnosis of a colon disorder, including cancers, which involves measuring the expression level of the gene encoding the colon antigen polypeptide in colon tissue or other cells or body fluid from an individual and comparing the measured gene expression level with a standard colon antigen gene expression level, whereby an increase or decrease in the gene expression level compared to the standard is indicative of a colon disorder. In specific embodiments, polynucleotides and antibodies of the invention are used to quantitate or qualitate tissues/cells corresponding to the library source disclosed in column 7 of Table 1A expressing the corresponding colon sequence disclosed in the same row of Table 1A, preferrably on their cell surface.

[0408] Where a diagnosis of a disorder in the colon, including diagnosis of a tumor, has already been made according to conventional methods, the present invention is useful as a prognostic indicator, whereby patients exhibiting enhanced or depressed colon antigen gene expression will experience a worse clinical outcome relative to patients expressing the gene at a level nearer the standard level.

[0409] By “assaying the expression level of the gene encoding the colon associated polypeptide” is intended qualitatively or quantitatively measuring or estimating the level of the colon antigen polypeptide or the level of the mRNA encoding the colon antigen polypeptide in a first biological sample either directly (e.g., by determining or estimating absolute protein level or mRNA level) or relatively (e.g., by comparing to the colon associated polypeptide level or mRNA level in a second biological sample). Preferably, the colon antigen polypeptide expression level or mRNA level in the first biological sample is measured or estimated and compared to a standard colon antigen polypeptide level or mRNA level, the standard being taken from a second biological sample obtained from an individual not having the disorder or being determined by averaging levels from a population of individuals not having a disorder of the colon. As will be appreciated in the art, once a standard colon antigen polypeptide level or mRNA level is known, it can be used repeatedly as a standard for comparison.

[0410] By “biological sample” is intended any biological sample obtained from an individual, cell line, tissue culture, or other source containing colon antigen polypeptides (including portions thereof) or mRNA. As indicated, biological samples include body fluids (such as sera, plasma, urine, synovial fluid and spinal fluid) which contain cells expressing colon antigen polypeptides, colon tissue, and other tissue sources found to express the full length or fragments thereof of a colon antigen. Methods for obtaining tissue biopsies and body fluids from mammals are well known in the art. Where the biological sample is to include mRNA, a tissue biopsy is the preferred source.

[0411] Total cellular RNA can be isolated from a biological sample using any suitable technique such as the single-step guanidinium-thiocyanate-phenol-chloroform method described in Chomczynski and Sacchi, Anal. Biochem. 162:156-159 (1987). Levels of mRNA encoding the colon antigen polypeptides are then assayed using any appropriate method. These include Northern blot analysis, S1 nuclease mapping, the polymerase chain reaction (PCR), reverse transcription in combination with the polymerase chain reaction (RT-PCR), and reverse transcription in combination with the ligase chain reaction (RT-LCR).

[0412] The present invention also relates to diagnostic assays such as quantitative and diagnostic assays for detecting levels of colon antigen polypeptides, in a biological sample (e.g., cells and tissues), including determination of normal and abnormal levels of polypeptides. Thus, for instance, a diagnostic assay in accordance with the invention for detecting over-expression of colon antigens compared to normal control tissue samples may be used to detect the presence of tumors. Assay techniques that can be used to determine levels of a polypeptide, such as a colon antigen polypeptide of the present invention in a sample derived from a host are well-known to those of skill in the art. Such assay methods include radioimmunoassays, competitive-binding assays, Western Blot analysis and ELISA assays. Assaying colon antigen polypeptide levels in a biological sample can occur using any art-known method.

[0413] Assaying colon antigen polypeptide levels in a biological sample can occur using antibody-based techniques. For example, colon antigen polypeptide expression in tissues can be studied with classical immunohistological methods (Jalkanen et al., J. Cell. Biol. 101:976-985 (1985); Jalkanen, M., et al., J. Cell . Biol. 105:3087-3096 (1987)). Other antibody-based methods useful for detecting colon antigen polypeptide gene expression include immunoassays, such as the enzyme linked immunosorbent assay (ELISA) and the radioimmunoassay (RIA). Suitable antibody assay labels are known in the art and include enzyme labels, such as, glucose oxidase, and radioisotopes, such as iodine (¹²⁵I, ¹²¹I), carbon (¹⁴C), sulfur (35S), tritium (³H), indium (¹¹²In), and technetium (^{99m}Tc), and fluorescent labels, such as fluorescein and rhodamine, and biotin.

[0414] The tissue or cell type to be analyzed will generally include those which are known, or suspected, to express the colon antigen gene (such as, for example, cells of the colon or colon cancer). The protein isolation methods employed herein may, for example, be such as those described in Harlow and Lane (Harlow, E. and Lane, D., 1988, “Antibodies: A Laboratory Manual”, Cold Spring Harbor Laboratory Press, Cold Spring Harbor, N.Y.), which is incorporated herein by reference in its entirety. The isolated cells can be derived from cell culture or from a patient. The analysis of cells taken from culture may be a necessary step in the assessment of cells that could be used as part of a cell-based gene therapy technique or, alternatively, to test the effect of compounds on the expression of the colon antigen gene.

[0415] For example, antibodies, or fragments of antibodies, such as those described herein, may be used to quantitatively or qualitatively detect the presence of colon antigen gene products or conserved variants or peptide fragments thereof. This can be accomplished, for example, by immunofluorescence techniques employing a fluorescently labeled antibody coupled with light microscopic, flow cytometric, or fluorimetric detection.

[0416] In a preferred embodiment, antibodies, or fragments of antibodies directed to any one or all of the predicted epitope domains of the colon antigen polypeptides (Shown in Table 1A, column 6) may be used to quantitatively or qualitatively detect the presence of colon antigen gene products or conserved variants or peptide fragments thereof. This can be accomplished, for example, by immunofluorescence techniques employing a fluorescently labeled antibody coupled with light microscopic, flow cytometric, or fluorimetric detection.

[0417] In an additional preferred embodiment, antibodies, or fragments of antibodies directed to a conformational epitope of a colon antigen may be used to quantitatively or qualitatively detect the presence of colon antigen gene products or conserved variants or peptide fragments thereof. This can be accomplished, for example, by immunofluorescence techniques employing a fluorescently labeled antibody coupled with light microscopic, flow cytometric, or fluorimetric detection.

[0418] The antibodies (or fragments thereof), and/or colon antigen polypeptides of the present invention may, additionally, be employed histologically, as in immunofluorescence, immunoelectron microscopy or non-immunological assays, for in situ detection of colon antigen gene products or conserved variants or peptide fragments thereof. In situ detection may be accomplished by removing a histological specimen from a patient, and applying thereto a labeled antibody or colon antigen polypeptide of the present invention. The antibody (or fragment thereof) or colon antigen polypeptide is preferably applied by overlaying the labeled antibody (or fragment) onto a biological sample. Through the use of such a procedure, it is possible to determine not only the presence of the colon antigen gene product, or conserved variants or peptide fragments, or colon antigen polypeptide binding, but also its distribution in the examined tissue. Using the present invention, those of ordinary skill will readily perceive that any of a wide variety of histological methods (such as staining procedures) can be modified in order to achieve such in situ detection.

[0419] Immunoassays and non-immunoassays for colon antigen gene products or conserved variants or peptide fragments thereof will typically comprise incubating a sample, such as a biological fluid, a tissue extract, freshly harvested cells, or lysates of cells which have been incubated in cell culture, in the presence of a detectably labeled antibody capable of binding colon antigen gene products or conserved variants or peptide fragments thereof, and detecting the bound antibody by any of a number of techniques well-known in the art.

[0420] The biological sample may be brought in contact with and immobilized onto a solid phase support or carrier such as nitrocellulose, or other solid support which is capable of immobilizing cells, cell particles or soluble proteins. The support may then be washed with suitable buffers followed by treatment with the detectably labeled anti- colon antigen antibody or detectable colon antigen polypeptide. The solid phase support may then be washed with the buffer a second time to remove unbound antibody or polypeptide. Optionally the antibody is subsequently labeled. The amount of bound label on solid support may then be detected by conventional means.

[0421] By “solid phase support or carrier” is intended any support capable of binding an antigen or an antibody. Well-known supports or carriers include glass, polystyrene, polypropylene, polyethylene, dextran, nylon, amylases, natural and modified celluloses, polyacrylamides, gabbros, and magnetite. The nature of the carrier can be either soluble to some extent or insoluble for the purposes of the present invention. The support material may have virtually any possible structural configuration so long as the coupled molecule is capable of binding to an antigen or antibody. Thus, the support configuration may be spherical, as in a bead, or cylindrical, as in the inside surface of a test tube, or the external surface of a rod. Alternatively, the surface may be flat such as a sheet, test strip, etc. Preferred supports include polystyrene beads. Those skilled in the art will know many other suitable carriers for binding antibody or antigen, or will be able to ascertain the same by use of routine experimentation.

[0422] The binding activity of a given lot of anti- colon antigen antibody or colon antigen polypeptide may be determined according to well known methods. Those skilled in the art will be able to determine operative and optimal assay conditions for each determination by employing routine experimentation.

[0423] In addition to assaying colon antigen polypeptide levels or polynucleotide levels in a biological sample obtained from an individual, colon antigen polypeptide or polynucleotide can also be detected in vivo by imaging. For example, in one embodiment of the invention, colon antigen polypeptide and/or anti- colon antigen antibodies are used to image diseased cells of the colon, such as neoplasms. In another embodiment, colon antigen polynucleotides of the invention (e.g., polynucleotides complementary to all or a portion of colon antigen mRNA) and/or anti- colon antigen antibodies (e.g., antibodies directed to any one or a combination of the epitopes of colon antigens, antibodies directed to a conformational epitope of colon antigens, antibodies directed to the full length polypeptide expressed on the cell surface of a mammalian cell) are used to image diseased or neoplastic cells of the colon.

[0424] Antibody labels or markers for in vivo imaging of colon antigen polypeptides include those detectable by X-radiography, NMR, MRI, CAT-scans or ESR. For X-radiography, suitable labels include radioisotopes such as barium or cesium, which emit detectable radiation but are not overtly harmful to the subject. Suitable markers for NMR and ESR include those with a detectable characteristic spin, such as deuterium, which may be incorporated into the antibody by labeling of nutrients for the relevant hybridoma. Where in vivo imaging is used to detect enhanced levels of colon antigen polypeptides for diagnosis in humans, it may be preferable to use human antibodies or “humanized” chimeric monoclonal antibodies. Such antibodies can be produced using techniques described herein or otherwise known in the art. For example methods for producing chimeric antibodies are known in the art. See, for review, Morrison, Science 229:1202 (1985); Oi et al., Bio Techniques 4:214 (1986); Cabilly et al., U.S. Pat. No. 4,816,567; Taniguchi et al., EP 171496; Morrison et al., EP 173494; Neuberger et al., WO 8601533; Robinson et al., WO 8702671; Boulianne et al., Nature 312:643 (1984); Neuberger et al., Nature 314:268 (1985).

[0425] Additionally, any colon antigen polypeptides whose presence can be detected, can be administered. For example, colon antigen polypeptides labeled with a radio-opaque or other appropriate compound can be administered and visualized in vivo, as discussed, above for labeled antibodies. Further such colon antigen polypeptides can be utilized for in vitro diagnostic procedures.

[0426] A colon antigen polypeptide-specific antibody or antibody fragment which has been labeled with an appropriate detectable imaging moiety, such as a radioisotope (for example, ¹³¹I, ¹¹²In, ^{99m}Tc), a radio-opaque substance, or a material detectable by nuclear magnetic resonance, is introduced (for example, parenterally, subcutaneously or intraperitoneally) into the mammal to be examined for a colon disorder. It will be understood in the art that the size of the subject and the imaging system used will determine the quantity of imaging moiety needed to produce diagnostic images. In the case of a radioisotope moiety, for a human subject, the quantity of radioactivity injected will normally range from about 5 to 20 millicuries of ^{99m}Tc. The labeled antibody or antibody fragment will then preferentially accumulate at the location of cells which contain colon antigen protein. In vivo tumor imaging is described in S. W. Burchiel et al., “Immunopharmacokinetics of Radiolabeled Antibodies and Their Fragments” (Chapter 13 in Tumor Imaging: The Radiochemical Detection of Cancer, S. W. Burchiel and B. A. Rhodes, eds., Masson Publishing Inc. (1982)).

[0427] With respect to antibodies, one of the ways in which the anti- colon antigen antibody can be detectably labeled is by linking the same to an enzyme and using the linked product in an enzyme immunoassay (EIA) (Voller, A., “The Enzyme Linked Immunosorbent Assay (ELISA)”, 1978, Diagnostic Horizons 2:1-7, Microbiological Associates Quarterly Publication, Walkersville, md); Voller et al., J. Clin. Pathol. 31:507-520 (1978); Butler, J. E., Meth. Enzymol. 73:482-523 (1981); Maggio, E. (ed.), 1980, Enzyme Immunoassay, CRC Press, Boca Raton, Fla.,; Ishikawa, E. et al., (eds.), 1981, Enzyme Immunoassay, Kgaku Shoin, Tokyo). The enzyme, which is bound to the antibody will react with an appropriate substrate, preferably a chromogenic substrate, in such a manner as to produce a chemical moiety which can be detected, for example, by spectrophotometric, fluorimetric or by visual means. Enzymes which can be used to detectably label the antibody include, but are not limited to, malate dehydrogenase, staphylococcal nuclease, delta-5-steroid isomerase, yeast alcohol dehydrogenase, alpha-glycerophosphate, dehydrogenase, triose phosphate isomerase, horseradish peroxidase, alkaline phosphatase, asparaginase, glucose oxidase, beta-galactosidase, ribonuclease, urease, catalase, glucose-6-phosphate dehydrogenase, glucoamylase and acetylcholinesterase. Additionally, the detection can be accomplished by colorimetric methods which employ a chromogenic substrate for the enzyme. Detection may also be accomplished by visual comparison of the extent of enzymatic reaction of a substrate in comparison with similarly prepared standards.

[0428] Detection may also be accomplished using any of a variety of other immunoassays. For example, by radioactively labeling the antibodies or antibody fragments, it is possible to detect colon antigens through the use of a radioimmunoassay (RIA) (see, for example, Weintraub, B., Principles of Radioimmunoassays, Seventh Training Course on Radioligand Assay Techniques, The Endocrine Society, March, 1986, which is incorporated by reference herein). The radioactive isotope can be detected by means including, but not limited to, a gamma counter, a scintillation counter, or autoradiography.

[0429] It is also possible to label the antibody with a fluorescent compound. When the fluorescently labeled antibody is exposed to light of the proper wave length, its presence can then be detected due to fluorescence. Among the most commonly used fluorescent labeling compounds are fluorescein isothiocyanate, rhodamine, phycoerythrin, phycocyanin, allophycocyanin, ophthaldehyde and fluorescamine.

[0430] The antibody can also be detectably labeled using fluorescence emitting metals such as ¹⁵²Eu, or others of the lanthanide series. These metals can be attached to the antibody using such metal chelating groups as diethylenetriaminepentacetic acid (DTPA) or ethylenediaminetetraacetic acid (EDTA).

[0431] The antibody also can be detectably labeled by coupling it to a chemiluminescent compound. The presence of the chemiluminescent-tagged antibody is then determined by detecting the presence of luminescence that arises during the course of a chemical reaction. Examples of particularly useful chemiluminescent labeling compounds are luminol, isoluminol, theromatic acridinium ester, imidazole, acridinium salt and oxalate ester.

[0432] Likewise, a bioluminescent compound may be used to label the antibody of the present invention. Bioluminescence is a type of chemiluminescence found in biological systems in, which a catalytic protein increases the efficiency of the chemiluminescent reaction. The presence of a bioluminescent protein is determined by detecting the presence of luminescence. Important bioluminescent compounds for purposes of labeling are luciferin, luciferase and aequorin.

[0433] Methods for Detecting Colon Disease, Including Cancer

[0434] In general, a colon disease or cancer may be detected in a patient based on the presence of one or more colon antigen proteins of the invention and/or polynucleotides encoding such proteins in a biological sample (for example, blood, sera, urine, and/or tumor biopsies) obtained from the patient. In other words, such proteins and/or polynucleotides may be used as markers to indicate the presence or absence of a colon disease or disorder, including cancer. Cancers that may be diagnosed, and/or prognosed using the compositions of the invention include but are not limited to, colon cancer. In addition, such proteins and/or polynucleotides may be useful for the detection of other diseases and cancers, including cancers of tissues/cells corresponding to the library source disclosed in column 7 of Table 1A expressing the corresponding colon sequence disclosed in the same row of Table 1A. The binding agents provided herein generally permit detection of the level of antigen that binds to the agent in the biological sample. Polynucleotide primers and probes may be used to detect the level of mRNA encoding colon antigen polypeptides, which is also indicative of the presence or absence of a colon disease or disorder, including cancer. In general, colon antigen polypeptides should be present at a level that is at least three fold higher in diseased tissue than in normal tissue.

[0435] There are a variety of assay formats known to those of ordinary skill in the art for using a binding agent to detect polypeptide markers in a sample. See, e.g., Harlow and Lane, supra. In general, the presence or absence of a colon disease in a patient may be determined by (a) contacting a biological sample obtained from a patient with a binding agent; (b) detecting in the sample a level of polypeptide that binds to the binding agent; and (c) comparing the level of polypeptide with a predetermined cut-off value.

[0436] In a preferred embodiment, the assay involves the use of binding agent immobilized on a solid support to bind to and remove the colon antigen polypeptide of the invention from the remainder of the sample. The bound polypeptide may then be detected using a detection reagent that contains a reporter group and specifically binds to the binding agent/polypeptide complex. Such detection reagents may comprise, for example, a binding agent that specifically binds to the polypeptide or an antibody or other agent that specifically binds to the binding agent, such as an anti-immunoglobulin, protein G, protein A or a lectin. Alternatively, a competitive assay may be utilized, in which a polypeptide is labeled with a reporter group and allowed to bind to the immobilized binding agent after incubation of the binding agent with the sample. The extent to which components of the sample inhibit the binding of the labeled polypeptide to the binding agent is indicative of the reactivity of the sample with the immobilized binding agent. Suitable polypeptides for use within such assays include colon antigen polypeptides and portions thereof, or antibodies, to which the binding agent binds, as described above.

[0437] The solid support may be any material known to those of skill in the art to which colon antigen polypeptides of the invention may be attached. For example, the solid support may be a test well in a microtiter plate or a nitrocellulose or other suitable membrane. Alternatively, the support may be a bead or disc, such as glass fiberglass, latex or a plastic material such as polystyrene or polyvinylchloride. The support may also be a magnetic particle or a fiber optic sensor, such as those disclosed, for example, in U.S. Pat. No. 5,359,681. The binding agent may be immobilized on the solid support using a variety of techniques known to those of skill in the art, which are amply described in the patent and scientific literature. In the context of the present invention, the term “immobilization” refers to both noncovalent association, such as adsorption, and covalent attachment (which may be a direct linkage between the agent and functional groups on the support or may be a linkage by way of a cross-linking agent). Immobilization by adsorption to a well in a microtiter plate or to a membrane is preferred. In such cases, adsorption may be achieved by contacting the binding agent, in a suitable buffer, with the solid support for the suitable amount of time. The contact time varies with temperature, but is typically between about 1 hour and about 1 day. In general, contacting a well of plastic microtiter plate (such as polystyrene or polyvinylchloride) with an amount of binding agent ranging from about 10 ng to about 10 ug, and preferably about 100 ng to about 1 ug, is sufficient to immobilize an adequate amount of binding agent.

[0438] Covalent attachment of binding agent to a solid support may generally be achieved by first reacting the support with a bifunctional reagent that will react with both the support and a functional group, such as a hydroxyl or amino group, on the binding agent. For example, the binding agent may be covalently attached to supports having an appropriate polymer coating using benzoquinone or by condensation of an aldehyde group on the support with an amine and an active hydrogen on the binding partner (see, e.g., Pierce Immunotechnology Catalog and Handbook, 1991, at A12-A13).

[0439] Gene Therapy Methods

[0440] Also encompassed by the present invention are gene therapy methods for treating or preventing disorders, diseases and conditions. The gene therapy methods relate to the introduction of nucleic acid (DNA, RNA and antisense DNA or RNA) sequences into an animal to achieve expression of a colon antigen of the present invention. This method requires a polynucleotide which codes for a polypeptide of the present invention operatively linked to a promoter and any other genetic elements necessary for the expression of the polypeptide by the target tissue. Such gene therapy and delivery techniques are known in the art, see, for example, WO90/11092, which is herein incorporated by reference.

[0441] Thus, for example, cells from a patient may be engineered with a polynucleotide (DNA or RNA) comprising a promoter operably linked to a polynucleotide of the present invention ex vivo, with the engineered cells then being provided to a patient to be treated with the polypeptide of the present invention. Such methods are well-known in the art. For example, see Belldegrun, A., et al., J. Natl. Cancer Inst. 85: 207-216 (1993); Ferrantini, M. et al., Cancer Research 53: 1107-1112 (1993); Ferrantini, M. et al., J. Immunology 153: 4604-4615 (1994); Kaido, T., et al., Int. J. Cancer 60: 221-229 (1995); Ogura, H., et al., Cancer Research 50: 5102-5106 (1990); Santodonato, L., et al., Human Gene Therapy 7:1-10 (1996); Santodonato, L., et al., Gene Therapy 4:1246-1255 (1997); and Zhang, J.-F. et al., Cancer Gene Therapy 3: 31-38 (1996)), which are herein incorporated by reference. In one embodiment, the cells, which are engineered are arterial cells. The arterial cells may be reintroduced into the patient through direct injection to the artery, the tissues surrounding the artery, or through catheter injection.

[0442] As discussed in more detail below, the polynucleotide constructs can be delivered by any method that delivers injectable materials to the cells of an animal, such as, injection into the interstitial space of tissues (heart, muscle, skin, lung, liver, and the like). The polynucleotide constructs may be delivered in a pharmaceutically acceptable liquid or aqueous carrier.

[0443] In one embodiment, the polynucleotide of the present invention is delivered as a naked polynucleotide. The term “naked” polynucleotide, DNA or RNA refers to sequences that are free from any delivery vehicle that acts to assist, promote or facilitate entry into the cell, including viral sequences, viral particles, liposome formulations, lipofectin or precipitating agents and the like. However, the polynucleotide of the present invention can also be delivered in liposome formulations and lipofectin formulations and the like can be prepared by methods well known to those skilled in the art. Such methods are described, for example, in U.S. Pat. Nos. 5,593,972, 5,589,466, and 5,580,859, which are herein incorporated by reference.

[0444] The polynucleotide vector constructs used in the gene therapy method are preferably constructs that will not integrate into the host genome nor will they contain sequences that allow for replication. Appropriate vectors include pWLNEO, pSV2CAT, pOG44, pXT1 and pSG available from Stratagene; pSVK3, pBPV, pMSG and pSVL available from Pharmacia; and pEF1/V5, pcDNA3.1, and pRc/CMV2 available from Invitrogen. Other suitable vectors will be readily apparent to the skilled artisan.

[0445] Any strong promoter known to those skilled in the art can be used for driving the expression of the polynucleotide sequence. Suitable promoters include adenoviral promoters, such as the adenoviral major late promoter; or heterologous promoters, such as the cytomegalovirus (CMV) promoter; the respiratory syncytial virus (RSV) promoter; inducible promoters, such as the MMT promoter, the metallothionein promoter; heat shock promoters; the albumin promoter; the ApoAI promoter; human globin promoters; viral thymidine kinase promoters, such as the Herpes Simplex thymidine kinase promoter; retroviral LTRs; the b-actin promoter; and human growth hormone promoters. The promoter also may be the native promoter for the polynucleotide of the present invention.

[0446] Unlike other gene therapy techniques, one major advantage of introducing naked nucleic acid sequences into target cells is the transitory nature of the polynucleotide synthesis in the cells. Studies have shown that non-replicating DNA sequences can be introduced into cells to provide production of the desired polypeptide for periods of up to six months.

[0447] The polynucleotide construct can be delivered to the interstitial space of tissues within the an animal, including of muscle, skin, brain, lung, liver, spleen, bone marrow, thymus, heart, lymph, blood, bone, cartilage, pancreas, kidney, gall bladder, stomach, intestine, testis, ovary, uterus, rectum, nervous system, eye, gland, and connective tissue. Interstitial space of the tissues comprises the intercellular, fluid, mucopolysaccharide matrix among the reticular fibers of organ tissues, elastic fibers in the walls of vessels or chambers, collagen fibers of fibrous tissues, or that same matrix within connective tissue ensheathing muscle cells or in the lacunae of bone. It is similarly the space occupied by the plasma of the circulation and the lymph fluid of the lymphatic channels. Delivery to the interstitial space of muscle tissue is preferred for the reasons discussed below. They may be conveniently delivered by injection into the tissues comprising these cells. They are preferably delivered to and expressed in persistent, non-dividing cells which are differentiated, although delivery and expression may be achieved in non-differentiated or less completely differentiated cells, such as, for example, stem cells of blood or skin fibroblasts. In vivo muscle cells are particularly competent in their ability to take up and express polynucleotides.

[0448] For the naked nucleic acid sequence injection, an effective dosage amount of DNA or RNA will be in the range of from about 0.05 mg/kg body weight to about 50 mg/kg body weight. Preferably the dosage will be from about 0.005 mg/kg to about 20 mg/kg and more preferably from about 0.05 mg/kg to about 5 mg/kg. Of course, as the artisan of ordinary skill will appreciate, this dosage will vary according to the tissue site of injection. The appropriate and effective dosage of nucleic acid sequence can readily be determined by those of ordinary skill in the art and may depend on the condition being treated and the route of administration.

[0449] The preferred route of administration is by the parenteral route of injection into the interstitial space of tissues. However, other parenteral routes may also be used, such as, inhalation of an aerosol formulation particularly for delivery to lungs or bronchial tissues, throat or mucous membranes of the nose. In addition, naked DNA constructs can be delivered to arteries during angioplasty by the catheter used in the procedure.

[0450] The naked polynucleotides are delivered by any method known in the art, including, but not limited to, direct needle injection at the delivery site, intravenous injection, topical administration, catheter infusion, and so-called “gene guns”. These delivery methods are known in the art.

[0451] The constructs may also be delivered with delivery vehicles such as viral sequences, viral particles, liposome formulations, lipofectin, precipitating agents, etc. Such methods of delivery are known in the art.

[0452] In certain embodiments, the polynucleotide constructs are complexed in a liposome preparation. Liposomal preparations for use in the instant invention include cationic (positively charged), anionic (negatively charged) and neutral preparations. However, cationic liposomes are particularly preferred because a tight charge complex can be formed between the cationic liposome and the polyanionic nucleic acid. Cationic liposomes have been shown to mediate intracellular delivery of plasmid DNA (Felgner et al., Proc. Natl. Acad. Sci. USA (1987) 84:7413-7416, which is herein incorporated by reference); mRNA (Malone et al., Proc. Natl. Acad. Sci. USA (1989) 86:6077-6081, which is herein incorporated by reference); and purified transcription factors (Debs et al., J. Biol. Chem. (1990) 265:10189-10192, which is herein incorporated by reference), in functional form.

[0453] Cationic liposomes are readily available. For example, N[1-2,3-dioleyloxy)propyl]-N,N,N-triethylammonium (DOTMA) liposomes are particularly useful and are available under the trademark Lipofectin, from GIBCO BRL, Grand Island, N.Y., (see, also, Felgner et al., Proc. Natl Acad. Sci. USA (1987) 84:7413-7416, which is herein incorporated by reference). Other commercially available liposomes include transfectace (DDAB/DOPE) and DOTAP/DOPE (Boehringer).

[0454] Other cationic liposomes can be prepared from readily available materials using techniques well known in the art. See, e.g. PCT Publication No. WO 90/11092 (which is herein incorporated by reference) for a description of the synthesis of DOTAP (1,2-bis(oleoyloxy)-3-(trimethylammonio)propane) liposomes. Preparation of DOTMA liposomes is explained in the literature, see, e.g., P. Felgner et al., Proc. Natl. Acad. Sci. USA 84:7413-7417, which is herein incorporated by reference. Similar methods can be used to prepare liposomes from other cationic lipid materials.

[0455] Similarly, anionic and neutral liposomes are readily available, such as from Avanti Polar Lipids (Birmingham, Ala.), or can be easily prepared using readily available materials. Such materials include phosphatidyl choline, cholesterol, phosphatidyl ethanolamine, dioleoylphosphatidyl choline (DOPC), dioleoylphosphatidyl glycerol (DOPG), dioleoylphoshatidyl ethanolamine (DOPE), among others. These materials can also be mixed with the DOTMA and DOTAP starting materials in appropriate ratios. Methods for making liposomes using these materials are well known in the art.

[0456] For example, commercially dioleoylphosphatidyl choline (DOPC), dioleoylphosphatidyl glycerol (DOPG), and dioleoylphosphatidyl ethanolamine (DOPE) can be used in various combinations to make conventional liposomes, with or without the addition of cholesterol. Thus, for example, DOPG/DOPC vesicles can be prepared by drying 50 mg each of DOPG and DOPC under a stream of nitrogen gas into a sonication vial. The sample is placed under a vacuum pump overnight and is hydrated the following day with deionized water. The sample is then sonicated for 2 hours in a capped vial, using a Heat Systems model 350 sonicator equipped with an inverted cup (bath type) probe at the maximum setting while the bath is circulated at 15EC. Alternatively, negatively charged vesicles can be prepared without sonication to produce multilamellar vesicles or by extrusion through nucleopore membranes to produce unilamellar vesicles of discrete size. Other methods are known and available to those of skill in the art.

[0457] The liposomes can comprise multilamellar vesicles (MLVs), small unilamellar vesicles (SUVs), or large unilamellar vesicles (LUVs), with SUVs being preferred. The various liposome-nucleic acid complexes are prepared using methods well known in the art. See, e.g., Straubinger et al., Methods of Immunology (1983), 101:512-527, which is herein incorporated by reference. For example, MLVs containing nucleic acid can be prepared by depositing a thin film of phospholipid on the walls of a glass tube and subsequently hydrating with a solution of the material to be encapsulated. SUVs are prepared by extended sonication of MLVs to produce a homogeneous population of unilamellar liposomes. The material to be entrapped is added to a suspension of preformed MLVs and then sonicated. When using liposomes containing cationic lipids, the dried lipid film is resuspended in an appropriate solution such as sterile water or an isotonic buffer solution such as 10 mM Tris/NaCl, sonicated, and then the preformed liposomes are mixed directly with the DNA. The liposome and DNA form a very stable complex due to binding of the positively charged liposomes to the cationic DNA. SUVs find use with small nucleic acid fragments. LUVs are prepared by a number of methods, well known in the art. Commonly used methods include Ca²⁺-EDTA chelation (Papahadjopoulos et al., Biochim. Biophys. Acta (1975) 394:483; Wilson et al., Cell 17:77 (1979); ether injection (Deamer, D. and Bangham, A., Biochim. Biophys. Acta 443:629 (1976); Ostro et al., Biochem. Biophys. Res. Commun. 76:836 (1977); Fraley et al., Proc. Natl. Acad. Sci. USA 76:3348 (1979)); detergent dialysis (Enoch, H. and Strittmatter, P., Proc. Natl. Acad. Sci. USA 76:145 (1979)); and reverse-phase evaporation (REV) (Fraley et al., J. Biol. Chem. 255:10431 (1980); Szoka et al., Proc. Natl. Acad. Sci. USA 75:145 (1978); Schaefer-Ridder et al., Science 215:166 (1982)), which are herein incorporated by reference.

[0458] Generally, the ratio of DNA to liposomes will be from about 10:1 to about 1:10. Preferably, the ration will be from about 5:1 to about 1:5. More preferably, the ration will be about 3:1 to about 1:3. Still more preferably, the ratio will be about 1:1.

[0459] U.S. Pat. No. 5,676,954 (which is herein incorporated by reference) reports on the injection of genetic material, complexed with cationic liposomes carriers, into mice. U.S. Pat. Nos. 4,897,355, 4,946,787, 5,049,386, 5,459,127, 5,589,466, 5,693,622, 5,580,859, 5,703,055, and international publication no. WO 94/9469 (which are herein incorporated by reference) provide cationic lipids for use in transfecting DNA into cells and mammals. U.S. Pat. Nos. 5,589,466, 5,693,622, 5,580,859, 5,703,055, and International Publication No. WO 94/9469 provide methods for delivering DNA-cationic lipid complexes to mammals.

[0460] In certain embodiments, cells are engineered, ex vivo or in vivo, using a retroviral particle containing RNA, which comprises a sequence encoding a polypeptide of the present invention. Retroviruses from which the retroviral plasmid vectors may be derived include, but are not limited to, Moloney Murine Leukemia Virus, spleen necrosis virus, Rous sarcoma Virus, Harvey Sarcoma Virus, avian leukosis virus, gibbon ape leukemia virus, human immunodeficiency virus, Myeloproliferative Sarcoma Virus, and mammary tumor virus.

[0461] The retroviral plasmid vector is employed to transduce packaging cell lines to form producer cell lines. Examples of packaging cells which may be transfected include, but are not limited to, the PE501, PA317, R-2, R-AM, PA12, T19-14X, VT-19-17-H2, RCRE, RCRIP, GP+E-86, GP+envAm12, and DAN cell lines as described in Miller, Human Gene Therapy 1:5-14 (1990), which is incorporated herein by reference in its entirety. The vector may transduce the packaging cells through any means known in the art. Such means include, but are not limited to, electroporation, the use of liposomes, and CaPO₄ precipitation. In one alternative, the retroviral plasmid vector may be encapsulated into a liposome, or coupled to a lipid, and then administered to a host.

[0462] The producer cell line generates infectious retroviral vector particles, which include polynucleotide encoding a polypeptide of the present invention. Such retroviral vector particles then may be employed, to transduce eukaryotic cells, either in vitro or in vivo. The transduced eukaryotic cells will express a polypeptide of the present invention.

[0463] In certain other embodiments, cells are engineered, ex vivo or in vivo, with polynucleotide contained in an adenovirus vector. Adenovirus can be manipulated such that it encodes and expresses a polypeptide of the present invention, and at the same time is inactivated in terms of its ability to replicate in a normal lytic viral life cycle. Adenovirus expression is achieved without integration of the viral DNA into the host cell chromosome, thereby alleviating concerns about insertional mutagenesis. Furthermore, adenoviruses have been used as live enteric vaccines for many years with an excellent safety profile (Schwartz, et al., Am. Rev. Respir. Dis.109:233-238 (1974)). Finally, adenovirus mediated gene transfer has been demonstrated in a number of instances including transfer of alpha-1-antitrypsin and CFTR to the lungs of cotton rats (Rosenfeld et al., Science 252:431-434 (1991); Rosenfeld et al., Cell 68:143-155 (1991)). Furthermore, extensive studies to attempt to establish adenovirus as a causative agent in human cancer were uniformly negative (Green et al., Proc. Natl. Acad. Sci. USA 76:6606 (1979)).

[0464] Suitable adenoviral vectors useful in the present invention are described, for example, in Kozarsky and Wilson, Curr. Opin. Genet. Devel. 3:499-503 (1993); Rosenfeld et al., Cell 68:143-155 (1992); Engelhardt et al., Human Genet. Ther. 4:759-769 (1993); Yang et al., Nature Genet. 7:362-369 (1994); Wilson et al., Nature 365:691-692 (1993); and U.S. Pat. No. 5,652,224, which are herein incorporated by reference. For example, the adenovirus vector Ad2 is useful and can be grown in human 293 cells. These cells contain the E1 region of adenovirus and constitutively express E1a and E1b, which complement the defective adenoviruses by providing the products of the genes deleted from the vector. In addition to Ad2, other varieties of adenovirus (e.g., Ad3, Ad5, and Ad7) are also useful in the present invention.

[0465] Preferably, the adenoviruses used in the present invention are replication deficient. Replication deficient adenoviruses require the aid of a helper virus and/or packaging cell line to form infectious particles. The resulting virus is capable of infecting cells and can express a polynucleotide of interest which is operably linked to a promoter, but cannot replicate in most cells. Replication deficient adenoviruses may be deleted in one or more of all or a portion of the following genes: E1a, E1b, E3, E4, E2a, or L1 through L5.

[0466] In certain other embodiments, the cells are engineered, ex vivo or in vivo, using an adeno-associated virus (AAV). AAVs are naturally occurring defective viruses that require helper viruses to produce infectious particles (Muzyczka, N., Curr. Topics in Microbiol. Immunol. 158:97 (1992)). It is also one of the few viruses that may integrate its DNA into non-dividing cells. Vectors containing as little as 300 base pairs of AAV can be packaged and can integrate, but space for exogenous DNA is limited to about 4.5 kb. Methods for producing and using such AAVs are known in the art. See, for example, U.S. Pat. Nos. 5,139,941, 5,173,414, 5,354,678, 5,436,146, 5,474,935, 5,478,745, and 5,589,377.

[0467] For example, an appropriate AAV vector for use in the present invention will include all the sequences necessary for DNA replication, encapsidation, and host-cell integration. The polynucleotide construct is inserted into the AAV vector using standard cloning methods, such as those found in Sambrook et al., Molecular Cloning: A Laboratory Manual, Cold Spring Harbor Press (1989). The recombinant AAV vector is then transfected into packaging cells which are infected with a helper virus, using any standard technique, including lipofection, electroporation, calcium phosphate precipitation, etc. Appropriate helper viruses include adenoviruses, cytomegaloviruses, vaccinia viruses, or herpes viruses. Once the packaging cells are transfected and infected, they will produce infectious AAV viral particles, which contain the polynucleotide construct. These viral particles are then used to transduce eukaryotic cells, either ex vivo or in vivo. The transduced cells will contain the polynucleotide construct integrated into its genome, and will express a polypeptide of the invention.

[0468] Another method of gene therapy involves operably associating heterologous control regions and endogenous colon antigen polynucleotide sequences (e.g., encoding a colon antigen polypeptide of the present invention) via homologous recombination (see, e.g., U.S. Pat. No. 5,641,670, issued Jun. 24, 1997; International Publication No. WO 96/29411, published Sep. 26, 1996; International Publication No. WO 94/12650, published Aug. 4, 1994; Koller et al., Proc. Natl. Acad. Sci. USA 86:8932-8935 (1989); and Zijlstra et al., Nature 342:435-438 (1989), which are herein incorporated by reference. This method involves the activation of a gene which is present in the target cells, but which is not normally expressed in the cells, or is expressed at a lower level than desired.

[0469] Polynucleotide constructs are made, using standard techniques known in the art, which contain the promoter with targeting sequences flanking the promoter. Suitable promoters are described herein. The targeting sequence is sufficiently complementary to an endogenous sequence to permit homologous recombination of the promoter-targeting sequence with the endogenous sequence. The targeting sequence will be sufficiently near the 5′ end of the desired endogenous polynucleotide sequence so the promoter will be operably linked to the endogenous sequence upon homologous recombination.

[0470] The promoter and the targeting sequences can be amplified using PCR. Preferably, the amplified promoter contains distinct restriction enzyme sites on the 5′ and 3′ ends. Preferably, the 3′ end of the first targeting sequence contains the same restriction enzyme site as the 5′ end of the amplified promoter and the 5′ end of the second targeting sequence contains the same restriction site as the 3′ end of the amplified promoter. The amplified promoter and targeting sequences are digested and ligated together.

[0471] The promoter-targeting sequence construct is delivered to the cells, either as naked polynucleotide, or in conjunction with transfection-facilitating agents, such as liposomes, viral sequences, viral particles, whole viruses, lipofection, precipitating agents, etc., described in more detail above. The P promoter-targeting sequence can be delivered by any method, included direct needle injection, intravenous injection, topical administration, catheter infusion, particle accelerators, etc. The methods are described in more detail below.

[0472] The promoter-targeting sequence construct is taken up by cells. Homologous recombination between the construct and the endogenous sequence takes place, such that an endogenous sequence is placed under the control of the promoter. The promoter then drives the expression of the endogenous sequence.

[0473] The polynucleotide encoding a polypeptide of the present invention may contain a secretory signal sequence that facilitates secretion of the protein. Typically, the signal sequence is positioned in the coding region of the polynucleotide to be expressed towards or at the 5′ end of the coding region. The signal sequence may be homologous or heterologous to the colon antigen polynucleotide of interest and may be homologous or heterologous to the cells to be transfected. Additionally, the signal sequence may be chemically synthesized using methods known in the art.

[0474] Any mode of administration of any of the above-described polynucleotides constructs can be used so long as the mode results in the expression of one or more molecules in an amount sufficient to provide a therapeutic effect. This includes direct needle injection, systemic injection, catheter infusion, biolistic injectors, particle accelerators (i.e., “gene guns”), gelfoam sponge depots, other commercially available depot materials, osmotic pumps (e.g., Alza minipumps), oral or suppositorial solid (tablet or pill) pharmaceutical formulations, and decanting or topical applications during surgery. For example, direct injection of naked calcium phosphate-precipitated plasmid into rat liver and rat spleen or a protein-coated plasmid into the portal vein has resulted in gene expression of the foreign gene in the rat livers (Kaneda et al., Science 243:375 (1989)).

[0475] A preferred method of local administration is by direct injection. Preferably, a recombinant molecule of the present invention complexed with a delivery vehicle is administered by direct injection into or locally within the area of arteries. Administration of a composition locally within the area of arteries refers to injecting the composition centimeters and preferably, millimeters within arteries.

[0476] Another method of local administration is to contact a polynucleotide construct of the present invention in or around a surgical wound. For example, a patient can undergo surgery and the polynucleotide construct can be coated on the surface of tissue inside the wound or the construct can be injected into areas of tissue inside the wound.

[0477] Therapeutic compositions useful in systemic administration, include recombinant molecules of the present invention complexed to a targeted delivery vehicle of the present invention. Suitable delivery vehicles for use with systemic administration comprise liposomes comprising ligands for targeting the vehicle to a particular site. In specific embodiments, suitable delivery vehicles for use with systemic administration comprise liposomes comprising polypeptides of the invention for targeting the vehicle to a particular site.

[0478] Preferred methods of systemic administration, include intravenous injection, aerosol, oral and percutaneous (topical) delivery. Intravenous injections can be performed using methods standard in the art. Aerosol delivery can also be performed using methods standard in the art (see, for example, Stribling et al., Proc. Natl. Acad. Sci. USA 189:11277-11281, 1992, which is incorporated herein by reference). Oral delivery can be performed by complexing a polynucleotide construct of the present invention to a carrier capable of withstanding degradation by digestive enzymes in the gut of an animal. Examples of such carriers, include plastic capsules or tablets, such as those known in the art. Topical delivery can be performed by mixing a polynucleotide construct of the present invention with a lipophilic reagent (e.g., DMSO) that is capable of passing into the skin.

[0479] Determining an effective amount of substance to be delivered can depend upon a number of factors including, for example, the chemical structure and biological activity of the substance, the age and weight of the animal, the precise condition requiring treatment and its severity, and the route of administration. The frequency of treatments depends upon a number of factors, such as the amount of polynucleotide constructs administered per dose, as well as the health and history of the subject. The precise amount, number of doses, and timing of doses will be determined by the attending physician or veterinarian.

[0480] Therapeutic compositions of the present invention can be administered to any animal, preferably to mammals and birds. Preferred mammals include humans, dogs, cats, mice, rats, rabbits sheep, cattle, horses and pigs, with humans being particularly preferred.

[0481] Biological Activities

[0482] Polynucleotides or polypeptides, or agonists or antagonists of the present invention, can be used in assays to test for one or more biological activities. If these polynucleotides or polypeptides, or agonists or antagonists of the present invention, do exhibit activity in a particular assay, it is likely that these molecules may be involved in the diseases associated with the biological activity. Thus, the polynucleotides and polypeptides, and agonists or antagonists could be used to treat, prevent diagnose and/or prognose the associated disease.

[0483] The colon antigen polynucleotides and polypeptides of the invention are predicted to have predominant expression in colon tissues.

[0484] Thus, the colon antigens of the invention may be useful as therapeutic molecules. Each would be useful for diagnosis, detection, treatment and/or prevention of diseases or disorders of the colon, including but not limited to congenital abnormalities, such as atresia and stenosis, Meckel diverticulum, congential aganglionic megacolon or Hirschsprung disease; colonic diverticulitis, colonic diverticulosis, toxic megacolon, constipation, disorders caused by parasites and protozoa (e.g., amoebic colitis, anisakiasis, balantidiasis, blastocystis infections, cryptosporidiosis, dientamoebiasis, amoebic dysentery, giardiasis, Lymphopathia venereum, Entamoeba histolytica), bacteria infection (e.g., Shigella, Salmonella, Yersinia, E. coli, Clostridium difficile), viral infection (e.g., cytomegalic virus, rotovirus); inflammatory bowel disease (e.g., ulcerative colitis, Crohn's disease, eosinophilic colitis); neoplastic disorders, such as, polyps (e.g., sessile polyp, adenomatous polyp, inflammatory polyps), adenomas (e.g., tubular adenoma, tubovillous adenomas, villous adenoma, Gardner syndrome, Peutz-Jeghers syndrome), hyperplastic, polyposis, villous, pseudopolyps, leiomyomas, carcinoids, lipomas, and angiomas, cancers, such as, rectal cancer, adenocarcinoma, colorectal carcinoma, colon cancer, colon carcinoma, colorectal cancer; colonic diseases); miscellaneous intestinal inflammatory disorders, including acquired immunodeficiency syndrome, HIV enteropathy, transplantation, drug-induced intestinal injury, radiation enterocolitis, neutropenic colitis, diverticular colon disease (DCD), inflammatory colonic disease, ischemic colitis, radiation proctitis, non-inflammatory bowel disease (non-IBD), colonic inflammation; colitis (e.g., infectious enterocolitis, necrotizing enterocolitis, antibiotic-associated colitis (pseudomembranous colitis), and collagenous and lymphocytic colitis); diarrhea and dysentary, malabsorption syndromes (e.g., blind loop syndrome, lactose intolerance, short bowl syndrome, whipple's disease), mesenteric vascular occlusion, pneumatosis cystoides intestinalis, protein-losing enteropathies (intestinal lymphagiectasis); intestinal obstruction (e.g., afferent loop syndrome, impacted feces, intestinal pseudo-obstruction [cecal volvulus], intussusception), intestinal perforation, sigmoid diseases (e.g., proctocolitis, sigmoin neoplasms), and/or as described under “Gastrointestinal Disorders” below.

[0485] In a preferred embodiment, polynucleotides of the invention (e.g., a nucleic acid sequence of SEQ ID NO:X or the complement thereof; or the cDNA sequence contained in Clone ID NO:Z, or fragments or variants thereof) and/or polypeptides of the invention (e.g., an amino acid sequence contained in SEQ ID NO:Y, an amino acid sequence encoded by SEQ ID NO:X, or the complement threof, an amino acid sequence encoded by the cDNA sequence contained in Clone ID NO:Z and fragments or variants thereof as described herein) are useful for the diagnosis, detection, treatement, and/or prevention of diseases or disorders of the tissues/cells corresponding to the library source disclosed in column 7 of Table 1A expressing the corresponding colon sequence disclosed in the same row of Table 1A. In certain embodiments, a polypeptide of the invention, or polynucleotides, antibodies, agonists, or antagonists corresponding to that polypeptide, may be used to diagnose and/or prognose diseases and/or disorders associated with the tissue(s) in which the polypeptide of the invention is expressed, including one, two, three, four, five, or more tissues disclosed in Table 1A, column 7 (Tissue Distribution Library Code).

[0486] Particularly, the colon antigens may be a useful therapeutic for colon cancer. Treatment, diagnosis, detection, and/or prevention of colon disorders could be carried out using a colon antigen or soluble form of a colon antigen, a colon antigen ligand, gene therapy, or ex vivo applications. Moreover, inhibitors of a colon antigen, either blocking antibodies or mutant forms, could modulate the expression of the colon antigen. These inhibitors may be useful to treat, diagnose, detect, and/or prevent diseases associated with the misregulation of a colon antigen.

[0487] In one embodiment, the invention provides a method for the specific delivery of compositions of the invention to cells (e.g., normal or diseased colon cells) by administering polypeptides of the invention (e.g., colon antigen polypeptides or anti- colon antigen antibodies) that are associated with heterologous polypeptides or nucleic acids. In one example, the invention provides a method for delivering a therapeutic protein into the targeted cell (e.g., an aberrant colon cell or colon cancer cell). In another example, the invention provides a method for delivering a single stranded nucleic acid (e.g., antisense or ribozymes) or double stranded nucleic acid (e.g., DNA that can integrate into the cell's genome or replicate episomally and that can be transcribed) into the targeted cell.

[0488] In another embodiment, the invention provides a method for the specific destruction of cells (e.g., the destruction of aberrant colon cells, including, but not limited to, colon tumor cells) by administering polypeptides of the invention (e.g., colon antigen polypeptides or fragments thereof, or anti- colon antigen antibodies) in association with toxins or cytotoxic prodrugs.

[0489] By “toxin” is meant compounds that bind and activate endogenous cytotoxic effector systems, radioisotopes, holotoxins, modified toxins, catalytic subunits of toxins, cytotoxins (cytotoxic agents), or any molecules or enzymes not normally present in or on the surface of a cell that under defined conditions cause the cell's death. Toxins that may be used according to the methods of the invention include, but are not limited to, radioisotopes known in the art, compounds such as, for example, antibodies (or complement fixing containing portions thereof) that bind an inherent or induced endogenous cytotoxic effector system, thymidine kinase, endonuclease, RNAse, alpha toxin, ricin, abrin, Pseudomonas exotoxin A, diphtheria toxin, saporin, momordin, gelonin, pokeweed antiviral protein, alpha-sarcin and cholera toxin. “Toxin” also includes a cytostatic or cytocidal agent, a therapeutic agent or a radioactive metal ion, e.g., alpha-emitters such as, for example, ²¹³Bi, or other radioisotopes such as, for example, ¹⁰³Pd, ¹³³Xe, ¹³¹I, ⁶⁸Ge, ⁵⁷Co, ⁶⁵Zn, ⁸⁵Sr, ³²P, ³⁵S, ⁹⁰Y, ¹⁵³Sm, ¹⁵³Gd, ¹⁶⁹Yb, ⁵¹Cr, ⁵⁴Mn, ⁷⁵Se, ¹¹³Sn, ⁹⁰Yttrium, ¹¹⁷Tin, ¹⁸⁶Rhenium, ¹⁶⁶Holmium, and ¹⁸⁸Rhenium; luminescent labels, such as luminol; and fluorescent labels, such as fluorescein and rhodamine, and biotin.

[0490] Techniques known in the art may be applied to label antibodies of the invention. Such techniques include, but are not limited to, the use of bifunctional conjugating agents (see e.g., U.S. Pat. Nos. 5,756,065; 5,714,631; 5,696,239; 5,652,361; 5,505,931; 5,489,425; 5,435,990; 5,428,139; 5,342,604; 5,274,119; 4,994,560; and 5,808,003; the contents of each of which are hereby incorporated by reference in its entirety). A cytotoxin or cytotoxic agent includes any agent that is detrimental to cells. Examples include paclitaxol, cytochalasin B, gramicidin D, ethidium bromide, emetine, mitomycin, etoposide, tenoposide, vincristine, vinblastine, colchicin, doxorubicin, daunorubicin, dihydroxy anthracin dione, mitoxantrone, mithramycin, actinomycin D, 1-dehydrotestosterone, glucocorticoids, procaine, tetracaine, lidocaine, propranolol, and puromycin and analogs or homologs thereof. Therapeutic agents include, but are not limited to, antimetabolites (e.g., methotrexate, 6-mercaptopurine, 6-thioguanine, cytarabine, 5-fluorouracil decarbazine), alkylating agents (e.g., mechlorethamine, thioepa chlorambucil, melphalan, carmustine (BSNU) and lomustine (CCNU), cyclothosphamide, busulfan, dibromomannitol, streptozotocin, mitomycin C, and cis- dichlorodiamine platinum (II) (DDP) cisplatin), anthracyclines (e.g., daunorubicin (formerly daunomycin) and doxorubicin), antibiotics (e.g., dactinomycin (formerly actinomycin), bleomycin, mithramycin, and anthramycin (AMC)), and anti-mitotic agents (e.g., vincristine and vinblastine).

[0491] By “cytotoxic prodrug” is meant a non-toxic compound that is converted by an enzyme, normally present in the cell, into a cytotoxic compound. Cytotoxic prodrugs that may be used according to the methods of the invention include, but are not limited to, glutamyl derivatives of benzoic acid mustard alkylating agent, phosphate derivatives of etoposide or mitomycin C, cytosine arabinoside, daunorubisin, and phenoxyacetamide derivatives of doxorubicin.

[0492] It will be appreciated that conditions caused by a decrease in the standard or normal level of a colon antigen activity in an individual, particularly disorders of the colon, can be treated by administration of a colon antigen polypeptide (e.g., such as, for example, the complete colon antigen polypeptide, the soluble form of the extracellular domain of a colon antigen polypeptide, or cells expressing the complete protein) or agonist. Thus, the invention also provides a method of treatment of an individual in need of an increased level of colon antigen activity comprising administering to such an individual a pharmaceutical composition comprising an amount of an isolated colon antigen polypeptide of the invention, or agonist thereof (e.g., an agonistic anti- colon antigen antibody), effective to increase the colon antigen activity level in such an individual.

[0493] It will also be appreciated that conditions caused by a increase in the standard or normal level of colon antigen activity in an individual, particularly disorders of the colon, can be treated by administration of colon antigen polypeptides (e.g., such as, for example, the complete colon antigen polypeptide, the soluble form of the extracellular domain of a colon antigen polypeptide, or cells expressing the complete protein) or antagonist (e.g., an antagonistic colon antigen antibody). Thus, the invention also provides a method of treatment of an individual in need of an decreased level of colon antigen activity comprising administering to such an individual a pharmaceutical composition comprising an amount of an isolated colon antigen polypeptide of the invention, or antagonist thereof (e.g., an antagonistic anti-colon antigen antibody), effective to decrease the colon antigen activity level in such an individual.

[0494] More generally, polynucleotides, translation products and antibodies corresponding to this gene may be useful for the diagnosis, prognosis, prevention, and/or treatment of diseases and/or disorders associated with the following systems.

[0495] Gastrointestinal Disorders

[0496] Polynucleotides or polypeptides, or agonists or antagonists of the present invention, may be used to treat, prevent, diagnose, and/or prognose gastrointestinal disorders, including inflammatory diseases and/or conditions, infections, cancers (e.g., intestinal neoplasms (carcinoid tumor of the small intestine, non-Hodgkin's lymphoma of the small intestine, small bowl lymphoma)), and ulcers, such as peptic ulcers.

[0497] Gastrointestinal disorders include dysphagia, odynophagia, inflammation of the esophagus, peptic esophagitis, gastric reflux, submucosal fibrosis and stricturing, Mallory-Weiss lesions, leiomyomas, lipomas, epidermal cancers, adeoncarcinomas, gastric retention disorders, gastroenteritis, gastric atrophy, gastric/stomach cancers, polyps of the stomach, autoimmune disorders such as pernicious anemia, pyloric stenosis, gastritis (bacterial, viral, eosinophilic, stress-induced, chronic erosive, atrophic, plasma cell, and Ménétrier's), and peritoneal diseases (e.g., chyloperioneum, hemoperitoneum, mesenteric cyst, mesenteric lymphadenitis, mesenteric vascular occlusion, panniculitis, neoplasms, peritonitis, pneumoperitoneum, bubphrenic abscess).

[0498] Gastrointestinal disorders also include disorders associated with the small intestine, such as malabsorption syndromes, distension, irritable bowel syndrome, sugar intolerance, celiac disease, duodenal ulcers, duodenitis, tropical sprue, Whipple's disease, intestinal lymphangiectasia, Crohn's disease, appendicitis, obstructions of the ileum, Meckel's diverticulum, multiple diverticula, failure of complete rotation of the small and large intestine, lymphoma, and bacterial and parasitic diseases (such as Traveler's diarrhea, typhoid and paratyphoid, cholera, infection by Roundworms (Ascariasis lumbricoides), Hookworms (Ancylostoma duodenale), Threadworms (Enterobius vermicularis), Tapeworms (Taenia saginata, Echinococcus granulosus, Diphyllobothrium spp., and T. solium).

[0499] Liver diseases and/or disorders include intrahepatic cholestasis (alagille syndrome, biliary liver cirrhosis), fatty liver (alcoholic fatty liver, reye syndrome), hepatic vein thrombosis, hepatolentricular degeneration, hepatomegaly, hepatopulmonary syndrome, hepatorenal syndrome, portal hypertension (esophageal and gastric varices), liver abscess (amebic liver abscess), liver cirrhosis (alcoholic, biliary and experimental), alcoholic liver diseases (fatty liver, hepatitis, cirrhosis), parasitic (hepatic echinococcosis, fascioliasis, amebic liver abscess), jaundice (hemolytic, hepatocellular, and cholestatic), cholestasis, portal hypertension, liver enlargement, ascites, hepatitis (alcoholic hepatitis, animal hepatitis, chronic hepatitis (autoimmune, hepatitis B, hepatitis C, hepatitis D, drug induced), toxic hepatitis, viral human hepatitis (hepatitis A, hepatitis B, hepatitis C, hepatitis D, hepatitis E), Wilson's disease, granulomatous hepatitis, secondary biliary cirrhosis, hepatic encephalopathy, portal hypertension, varices, hepatic encephalopathy, primary biliary cirrhosis, primary sclerosing cholangitis, hepatocellular adenoma, hemangiomas, bile stones, liver failure (hepatic encephalopathy, acute liver failure), and liver neoplasms (angiomyolipoma, calcified liver metastases, cystic liver metastases, epithelial tumors, fibrolamellar hepatocarcinoma, focal nodular hyperplasia, hepatic adenoma, hepatobiliary cystadenoma, hepatoblastoma, hepatocellular carcinoma, hepatoma, liver cancer, liver hemangioendothelioma, mesenchymal hamartoma, mesenchymal tumors of liver, nodular regenerative hyperplasia, benign liver tumors (Hepatic cysts [Simple cysts, Polycystic liver disease, Hepatobiliary cystadenoma, Choledochal cyst], Mesenchymal tumors [Mesenchymal hamartoma, Infantile hemangioendothelioma, Hemangioma, Peliosis hepatis, Lipomas, Inflammatory pseudotumor, Miscellaneous], Epithelial tumors [Bile duct epithelium (Bile duct hamartoma, Bile duct adenoma), Hepatocyte (Adenoma, Focal nodular hyperplasia, Nodular regenerative hyperplasia)], malignant liver tumors [hepatocellular, hepatoblastoma, hepatocellular carcinoma, cholangiocellular, cholangiocarcinoma, cystadenocarcinoma, tumors of blood vessels, angiosarcoma, Karposi's sarcoma, hemangioendothelioma, other tumors, embryonal sarcoma, fibrosarcoma, leiomyosarcoma, rhabdomyosarcoma, carcinosarcoma, teratoma, carcinoid, squamous carcinoma, primary lymphoma]), peliosis hepatis, erythrohepatic porphyria, hepatic porphyria (acute intermittent porphyria, porphyria cutanea tarda), Zellweger syndrome).

[0500] Pancreatic diseases and/or disorders include acute pancreatitis, chronic pancreatitis (acute necrotizing pancreatitis, alcoholic pancreatitis), neoplasms (adenocarcinoma of the pancreas, cystadenocarcinoma, insulinoma, gastrinoma, and glucagonoma, cystic neoplasms, islet-cell tumors, pancreoblastoma), and other pancreatic diseases (e.g., cystic fibrosis, cyst (pancreatic pseudocyst, pancreatic fistula, insufficiency)).

[0501] Gallbladder diseases include gallstones (cholelithiasis and choledocholithiasis), postcholecystectomy syndrome, diverticulosis of the gallbladder, acute cholecystitis, chronic cholecystitis, bile duct tumors, and mucocele.

[0502] Diseases and/or disorders of the large intestine include antibiotic-associated colitis, diverticulitis, ulcerative colitis, acquired megacolon, abscesses, fungal and bacterial infections, anorectal disorders (e.g., fissures, hemorrhoids), colonic diseases (colitis, colonic neoplasms [colon cancer, adenomatous colon polyps (e.g., villous adenoma), colon carcinoma, colorectal cancer], colonic diverticulitis, colonic diverticulosis, megacolon [Hirschsprung disease, toxic megacolon]; sigmoid diseases [proctocolitis, sigmoin neoplasms]), constipation, Crohn's disease, diarrhea (infantile diarrhea, dysentery), duodenal diseases (duodenal neoplasms, duodenal obstruction, duodenal ulcer, duodenitis), enteritis (enterocolitis), HIV enteropathy, ileal diseases (ileal neoplasms, ileitis), immunoproliferative small intestinal disease, inflammatory bowel disease (ulcerative colitis, Crohn's disease), intestinal atresia, parasitic diseases (anisakiasis, balantidiasis, blastocystis infections, cryptosporidiosis, dientamoebiasis, amebic dysentery, giardiasis), intestinal fistula (rectal fistula), intestinal neoplasms (cecal neoplasms, colonic neoplasms, duodenal neoplasms, ileal neoplasms, intestinal polyps, jejunal neoplasms, rectal neoplasms), intestinal obstruction (afferent loop syndrome, duodenal obstruction, impacted feces, intestinal pseudo-obstruction [cecal volvulus], intussusception), intestinal perforation, intestinal polyps (colonic polyps, gardner syndrome, peutz-jeghers syndrome), jejunal diseases (jejunal neoplasms), malabsorption syndromes (blind loop syndrome, celiac disease, lactose intolerance, short bowl syndrome, tropical sprue, whipple's disease), mesenteric vascular occlusion, pneumatosis cystoides intestinalis, protein-losing enteropathies (intestinal lymphagiectasis), rectal diseases (anus diseases, fecal incontinence, hemorrhoids, proctitis, rectal fistula, rectal prolapse, rectocele), peptic ulcer (duodenal ulcer, peptic esophagitis, hemorrhage, perforation, stomach ulcer, Zollinger-Ellison syndrome), postgastrectomy syndromes (dumping syndrome), stomach diseases (e.g., achlorhydria, duodenogastric reflux (bile reflux), gastric antral vascular ectasia, gastric fistula, gastric outlet obstruction, gastritis (atrophic or hypertrophic), gastroparesis, stomach dilatation, stomach diverticulum, stomach neoplasms (gastric cancer, gastric polyps, gastric adenocarcinoma, hyperplastic gastric polyp), stomach rupture, stomach ulcer, stomach volvulus), tuberculosis, visceroptosis, vomiting (e.g., hematemesis, hyperemesis gravidarum, postoperative nausea and vomiting) and hemorrhagic colitis.

[0503] Further diseases and/or disorders of the gastrointestinal system include biliary tract diseases, such as, gastroschisis, fistula (e.g., biliary fistula, esophageal fistula, gastric fistula, intestinal fistula, pancreatic fistula), neoplasms (e.g., biliary tract neoplasms, esophageal neoplasms, such as adenocarcinoma of the esophagus, esophageal squamous cell carcinoma, gastrointestinal neoplasms, pancreatic neoplasms, such as adenocarcinoma of the pancreas, mucinous cystic neoplasm of the pancreas, pancreatic cystic neoplasms, pancreatoblastoma, and peritoneal neoplasms), esophageal disease (e.g., bullous diseases, candidiasis, glycogenic acanthosis, ulceration, barrett esophagus varices, atresia, cyst, diverticulum (e.g., Zenker's diverticulum), fistula (e.g., tracheoesophageal fistula), motility disorders (e.g., CREST syndrome, deglutition disorders, achalasia, spasm, gastroesophageal reflux), neoplasms, perforation (e.g., Boerhaave syndrome, Mallory-Weiss syndrome), stenosis, esophagitis, diaphragmatic hernia (e.g., hiatal hernia); gastrointestinal diseases, such as, gastroenteritis (e.g., cholera morbus, norwalk virus infection), hemorrhage (e.g., hematemesis, melena, peptic ulcer hemorrhage), stomach neoplasms (gastric cancer, gastric polyps, gastric adenocarcinoma, stomach cancer)), hernia (e.g., congenital diaphragmatic hernia, femoral hernia, inguinal hernia, obturator hernia, umbilical hernia, ventral hernia), and intestinal diseases (e.g., cecal diseases (appendicitis, cecal neoplasms)).

[0504] Immune Activity

[0505] Polynucleotides, polypeptides, antibodies, and/or agonists or antagonists of the present invention may be useful in treating, preventing, diagnosing and/or prognosing diseases, disorders, and/or conditions of the immune system, by, for example, activating or inhibiting the proliferation, differentiation, or mobilization (chemotaxis) of immune cells. Immune cells develop through a process called hematopoiesis, producing myeloid (platelets, red blood cells, neutrophils, and macrophages) and lymphoid (B and T lymphocytes) cells from pluripotent stem cells. The etiology of these immune diseases, disorders, and/or conditions may be genetic, somatic, such as cancer and some autoimmune diseases, acquired (e.g., by chemotherapy or toxins), or infectious. Moreover, polynucleotides, polypeptides, antibodies, and/or agonists or antagonists of the present invention can be used as a marker or detector of a particular immune system disease or disorder.

[0506] In another embodiment, a polypeptide of the invention, or polynucleotides, antibodies, agonists, or antagonists corresponding to that polypeptide, may be used to treat diseases and disorders of the immune system and/or to inhibit or enhance an immune response generated by cells associated with the tissue(s) in which the polypeptide of the invention is expressed, including one, two, three, four, five, or more tissues disclosed in Table 1A, column 7 (Tissue Distribution Library Code).

[0507] Polynucleotides, polypeptides, antibodies, and/or agonists or antagonists of the present invention may be useful in treating, preventing, diagnosing, and/or prognosing immunodeficiencies, including both congenital and acquired immunodeficiencies. Examples of B cell immunodeficiencies in which immunoglobulin levels B cell function and/or B cell numbers are decreased include: X-linked agammaglobulinemia (Bruton's disease), X-linked infantile agammaglobulinemia, X-linked immunodeficiency with hyper IgM, non X-linked immunodeficiency with hyper IgM, X-linked lymphoproliferative syndrome (XLP), agammaglobulinemia including congenital and acquired agammaglobulinemia, adult onset agammaglobulinemia, late-onset agammaglobulinemia, dysgammaglobulinemia, hypogammaglobulinemia, unspecified hypogammaglobulinemia, recessive agammaglobulinemia (Swiss type), Selective IgM deficiency, selective IgA deficiency, selective IgG subclass deficiencies, IgG subclass deficiency (with or without IgA deficiency), Ig deficiency with increased IgM, IgG and IgA deficiency with increased IgM, antibody deficiency with normal or elevated Igs, Ig heavy chain deletions, kappa chain deficiency, B cell lymphoproliferative disorder (BLPD), common variable immunodeficiency (CVID), common variable immunodeficiency (CVI) (acquired), and transient hypogammaglobulinemia of infancy.

[0508] In specific embodiments, ataxia-telangiectasia or conditions associated with ataxia-telangiectasia are treated, prevented, diagnosed, and/or prognosing using the polypeptides or polynucleotides of the invention, and/or agonists or antagonists thereof.

[0509] Examples of congenital immunodeficiencies in which T cell and/or B cell function and/or number is decreased include, but are not limited to: DiGeorge anomaly, severe combined immunodeficiencies (SCID) (including, but not limited to, X-linked SCID, autosomal recessive SCID, adenosine deaminase deficiency, purine nucleoside phosphorylase (PNP) deficiency, Class II MHC deficiency (Bare lymphocyte syndrome), Wiskott-Aldrich syndrome, and ataxia telangiectasia), thymic hypoplasia, third and fourth pharyngeal pouch syndrome, 22ql1.2 deletion, chronic mucocutaneous candidiasis, natural killer cell deficiency (NK), idiopathic CD4+T-lymphocytopenia, immunodeficiency with predominant T cell defect (unspecified), and unspecified immunodeficiency of cell mediated immunity.

[0510] In specific embodiments, DiGeorge anomaly or conditions associated with DiGeorge anomaly are treated, prevented, diagnosed, and/or prognosed using polypeptides or polynucleotides of the invention, or antagonists or agonists thereof.

[0511] Other immunodeficiencies that may be treated, prevented, diagnosed, and/or prognosed using polypeptides or polynucleotides of the invention, and/or agonists or antagonists thereof, include, but are not limited to, chronic granulomatous disease, Chediak-Higashi syndrome, myeloperoxidase deficiency, leukocyte glucose-6-phosphate dehydrogenase deficiency, X-linked lymphoproliferative syndrome (XLP), leukocyte adhesion deficiency, complement component deficiencies (including C1, C2, C3, C4, C5, C6, C7, C8 and/or C9 deficiencies), reticular dysgenesis, thymic alymphoplasia-aplasia, immunodeficiency with thymoma, severe congenital leukopenia, dysplasia with immunodeficiency, neonatal neutropenia, short limbed dwarfism, and Nezelof syndrome-combined immunodeficiency with Igs.

[0512] In a preferred embodiment, the immunodeficiencies and/or conditions associated with the immunodeficiencies recited above are treated, prevented, diagnosed and/or prognosed using polynucleotides, polypeptides, antibodies, and/or agonists or antagonists of the present invention.

[0513] In a preferred embodiment polynucleotides, polypeptides, antibodies, and/or agonists or antagonists of the present invention could be used as an agent to boost immunoresponsiveness among immunodeficient individuals. In specific embodiments, polynucleotides, polypeptides, antibodies, and/or agonists or antagonists of the present invention could be used as an agent to boost immunoresponsiveness among B cell and/or T cell immunodeficient individuals.

[0514] The polynucleotides, polypeptides, antibodies, and/or agonists or antagonists of the present invention may be useful in treating, preventing, diagnosing and/or prognosing autoimmune disorders. Many autoimmune disorders result from inappropriate recognition of self as foreign material by immune cells. This inappropriate recognition results in an immune response leading to the destruction of the host tissue. Therefore, the administration of polynucleotides and polypeptides of the invention that can inhibit an immune response, particularly the proliferation, differentiation, or chemotaxis of T-cells, may be an effective therapy in preventing autoimmune disorders.

[0515] Autoimmune diseases or disorders that may be treated, prevented, diagnosed and/or prognosed by polynucleotides, polypeptides, antibodies, and/or agonists or antagonists of the present invention include, but are not limited to, one or more of the following: systemic lupus erythematosus, rheumatoid arthritis, ankylosing spondylitis, multiple sclerosis, autoimmune thyroiditis, Hashimoto's thyroiditis, autoimmune hemolytic anemia, hemolytic anemia, thrombocytopenia, autoimmune thrombocytopenia purpura, autoimmune neonatal thrombocytopenia, idiopathic thrombocytopenia purpura, purpura (e.g., Henloch-Scoenlein purpura), autoimmunocytopenia, Goodpasture's syndrome, Pemphigus vulgaris, myasthenia gravis, Grave's disease (hyperthyroidism), and insulin-resistant diabetes mellitus.

[0516] Additional disorders that are likely to have an autoimmune component that may be treated, prevented, and/or diagnosed with the compositions of the invention include, but are not limited to, type II collagen-induced arthritis, antiphospholipid syndrome, dermatitis, allergic encephalomyelitis, myocarditis, relapsing polychondritis, rheumatic heart disease, neuritis, uveitis ophthalmia, polyendocrinopathies, Reiter's Disease, Stiff-Man Syndrome, autoimmune pulmonary inflammation, autism, Guillain-Barre Syndrome, insulin dependent diabetes mellitus, and autoimmune inflammatory eye disorders.

[0517] Additional disorders that are likely to have an autoimmune component that may be treated, prevented, diagnosed and/or prognosed with the compositions of the invention include, but are not limited to, scleroderma with anti-collagen antibodies (often characterized, e.g., by nucleolar and other nuclear antibodies), mixed connective tissue disease (often characterized, e.g., by antibodies to extractable nuclear antigens (e.g., ribonucleoprotein)), polymyositis (often characterized, e.g., by nonhistone ANA), pernicious anemia (often characterized, e.g., by antiparietal cell, microsomes, and intrinsic factor antibodies), idiopathic Addison's disease (often characterized, e.g., by humoral and cell-mediated adrenal cytotoxicity, infertility (often characterized, e.g., by antispermatozoal antibodies), glomerulonephritis (often characterized, e.g., by glomerular basement membrane antibodies or immune complexes), bullous pemphigoid (often characterized, e.g., by IgG and complement in basement membrane), Sjogren's syndrome (often characterized, e.g., by multiple tissue antibodies, and/or a specific nonhistone ANA (SS-B)), diabetes mellitus (often characterized, e.g., by cell-mediated and humoral islet cell antibodies), and adrenergic drug resistance (including adrenergic drug resistance with asthma or cystic fibrosis) (often characterized, e.g., by beta-adrenergic receptor antibodies).

[0518] Additional disorders that may have an autoimmune component that may be treated, prevented, diagnosed and/or prognosed with the compositions of the invention include, but are not limited to, chronic active hepatitis (often characterized, e.g., by smooth muscle antibodies), primary biliary cirrhosis (often characterized, e.g., by mitochondria antibodies), other endocrine gland failure (often characterized, e.g., by specific tissue antibodies in some cases), vitiligo (often characterized, e.g., by melanocyte antibodies), vasculitis (often characterized, e.g., by Ig and complement in vessel walls and/or low serum complement), post-MI (often characterized, e.g., by myocardial antibodies), cardiotomy syndrome (often characterized, e.g., by myocardial antibodies), urticaria (often characterized, e.g., by IgG and IgM antibodies to IgE), atopic dermatitis (often characterized, e.g., by IgG and IgM antibodies to IgE), asthma (often characterized, e.g., by IgG and IgM antibodies to IgE), and many other inflammatory, granulomatous, degenerative, and atrophic disorders.

[0519] In a preferred embodiment, the autoimmune diseases and disorders and/or conditions associated with the diseases and disorders recited above are treated, prevented, diagnosed and/or prognosed using for example, antagonists or agonists, polypeptides or polynucleotides, or antibodies of the present invention. In a specific preferred embodiment, rheumatoid arthritis is treated, prevented, and/or diagnosed using polynucleotides, polypeptides, antibodies, and/or agonists or antagonists of the present invention.

[0520] In another specific preferred embodiment, systemic lupus erythematosus is treated, prevented, and/or diagnosed using polynucleotides, polypeptides, antibodies, and/or agonists or antagonists of the present invention. In another specific preferred embodiment, idiopathic thrombocytopenia purpura is treated, prevented, and/or diagnosed using polynucleotides, polypeptides, antibodies, and/or agonists or antagonists of the present invention.

[0521] In another specific preferred embodiment IgA nephropathy is treated, prevented, and/or diagnosed using polynucleotides, polypeptides, antibodies, and/or agonists or antagonists of the present invention.

[0522] In a preferred embodiment, the autoimmune diseases and disorders and/or conditions associated with the diseases and disorders recited above are treated, prevented, diagnosed and/or prognosed using polynucleotides, polypeptides, antibodies, and/or agonists or antagonists of the present invention.

[0523] In preferred embodiments, polypeptides, antibodies, polynucleotides and/or agonists or antagonists of the present invention are used as a immunosuppressive agent(s).

[0524] Polynucleotides, polypeptides, antibodies, and/or agonists or antagonists of the present invention may be useful in treating, preventing, prognosing, and/or diagnosing diseases, disorders, and/or conditions of hematopoietic cells. Polynucleotides, polypeptides, antibodies, and/or agonists or antagonists of the present invention could be used to increase differentiation and proliferation of hematopoietic cells, including the pluripotent stem cells, in an effort to treat or prevent those diseases, disorders, and/or conditions associated with a decrease in certain (or many) types hematopoietic cells, including but not limited to, leukopenia, neutropenia, anemia, and thrombocytopenia. Alternatively, Polynucleotides, polypeptides, antibodies, and/or agonists or antagonists of the present invention could be used to increase differentiation and proliferation of hematopoietic cells, including the pluripotent stem cells, in an effort to treat or prevent those diseases, disorders, and/or conditions associated with an increase in certain (or many) types of hematopoietic cells, including but not limited to, histiocytosis.

[0525] Allergic reactions and conditions, such as asthma (particularly allergic asthma) or other respiratory problems, may also be treated, prevented, diagnosed and/or prognosed using polypeptides, antibodies, or polynucleotides of the invention, and/or agonists or antagonists thereof. Moreover, these molecules can be used to treat, prevent, prognose, and/or diagnose anaphylaxis, hypersensitivity to an antigenic molecule, or blood group incompatibility.

[0526] Additionally, polypeptides or polynucleotides of the invention, and/or agonists or antagonists thereof, may be used to treat, prevent, diagnose and/or prognose IgE-mediated allergic reactions. Such allergic reactions include, but are not limited to, asthma, rhinitis, and eczema. In specific embodiments, polynucleotides, polypeptides, antibodies, and/or agonists or antagonists of the present invention may be used to modulate IgE concentrations in vitro or in vivo.

[0527] Moreover, polynucleotides, polypeptides, antibodies, and/or agonists or antagonists of the present invention have uses in the diagnosis, prognosis, prevention, and/or treatment of inflammatory conditions. For example, since polypeptides, antibodies, or polynucleotides of the invention, and/or agonists or antagonists of the invention may inhibit the activation, proliferation and/or differentiation of cells involved in an inflammatory response, these molecules can be used to prevent and/or treat chronic and acute inflammatory conditions. Such inflammatory conditions include, but are not limited to, for example, inflammation associated with infection (e.g., septic shock, sepsis, or systemic inflammatory response syndrome), ischemia-reperfusion injury, endotoxin lethality, complement-mediated hyperacute rejection, nephritis, cytokine or chemokine induced lung injury, inflammatory bowel disease, Crohn's disease, over production of cytokines (e.g., TNF or IL-1.), respiratory disorders (e.g., asthma and allergy); gastrointestinal disorders (e.g., inflammatory bowel disease); cancers (e.g., gastric, ovarian, lung, bladder, liver, and breast); CNS disorders (e.g., multiple sclerosis; ischemic brain injury and/or stroke, traumatic brain injury, neurodegenerative disorders (e.g., Parkinson's disease and Alzheimer's disease); AIDS-related dementia; and prion disease); cardiovascular disorders (e.g., atherosclerosis, myocarditis, cardiovascular disease, and cardiopulmonary bypass complications); as well as many additional diseases, conditions, and disorders that are characterized by inflammation (e.g., hepatitis, rheumatoid arthritis, gout, trauma, pancreatitis, sarcoidosis, dermatitis, renal ischemia-reperfusion injury, Grave's disease, systemic lupus erythematosus, diabetes mellitus, and allogenic transplant rejection).

[0528] Because inflammation is a fundamental defense mechanism, inflammatory disorders can effect virtually any tissue of the body. Accordingly, polynucleotides, polypeptides, and antibodies of the invention, as well as agonists or antagonists thereof, have uses in the treatment of tissue-specific inflammatory disorders, including, but not limited to, adrenalitis, alveolitis, angiocholecystitis, appendicitis, balanitis, blepharitis, bronchitis, bursitis, carditis, cellulitis, cervicitis, cholecystitis, chorditis, cochlitis, colitis, conjunctivitis, cystitis, dermatitis, diverticulitis, encephalitis, endocarditis, esophagitis, eustachitis, fibrositis, folliculitis, gastritis, gastroenteritis, gingivitis, glossitis, hepatosplenitis, keratitis, labyrinthitis, laryngitis, lymphangitis, mastitis, media otitis, meningitis, metritis, mucitis, myocarditis, myosititis, myringitis, nephritis, neuritis, orchitis, osteochondritis, otitis, pericarditis, peritendonitis, peritonitis, pharyngitis, phlebitis, poliomyelitis, prostatitis, pulpitis, retinitis, rhinitis, salpingitis, scleritis, sclerochoroiditis, scrotitis, sinusitis, spondylitis, steatitis, stomatitis, synovitis, syringitis, tendonitis, tonsillitis, urethritis, and vaginitis.

[0529] In specific embodiments, polypeptides, antibodies, or polynucleotides of the invention, and/or agonists or antagonists thereof, are useful to diagnose, prognose, prevent, and/or treat organ transplant rejections and graft-versus-host disease. Organ rejection occurs by host immune cell destruction of the transplanted tissue through an immune response. Similarly, an immune response is also involved in GVHD, but, in this case, the foreign transplanted immune cells destroy the host tissues. Polypeptides, antibodies, or polynucleotides of the invention, and/or agonists or antagonists thereof, that inhibit an immune response, particularly the activation, proliferation, differentiation, or chemotaxis of T-cells, may be an effective therapy in preventing organ rejection or GVHD. In specific embodiments, polypeptides, antibodies, or polynucleotides of the invention, and/or agonists or antagonists thereof, that inhibit an immune response, particularly the activation, proliferation, differentiation, or chemotaxis of T-cells, may be an effective therapy in preventing experimental allergic and hyperacute xenograft rejection.

[0530] In other embodiments, polypeptides, antibodies, or polynucleotides of the invention, and/or agonists or antagonists thereof, are useful to diagnose, prognose, prevent, and/or treat immune complex diseases, including, but not limited to, serum sickness, post streptococcal glomerulonephritis, polyarteritis nodosa, and immune complex-induced vasculitis.

[0531] Polypeptides, antibodies, polynucleotides and/or agonists or antagonists of the invention can be used to treat, detect, and/or prevent infectious agents. For example, by increasing the immune response, particularly increasing the proliferation activation and/or differentiation of B and/or T cells, infectious diseases may be treated, detected, and/or prevented. The immune response may be increased by either enhancing an existing immune response, or by initiating a new immune response. Alternatively, polynucleotides, polypeptides, antibodies, and/or agonists or antagonists of the present invention may also directly inhibit the infectious agent (refer to section of application listing infectious agents, etc), without necessarily eliciting an immune response.

[0532] In another embodiment, polypeptides, antibodies, polynucleotides and/or agonists or antagonists of the present invention are used as a vaccine adjuvant that enhances immune responsiveness to an antigen. In a specific embodiment, polypeptides, antibodies, polynucleotides and/or agonists or antagonists of the present invention are used as an adjuvant to enhance tumor-specific immune responses.

[0533] In another specific embodiment, polypeptides, antibodies, polynucleotides and/or agonists or antagonists of the present invention are used as an adjuvant to enhance anti-viral immune responses. Anti-viral immune responses that may be enhanced using the compositions of the invention as an adjuvant, include virus and virus associated diseases or symptoms described herein or otherwise known in the art. In specific embodiments, the compositions of the invention are used as an adjuvant to enhance an immune response to a virus, disease, or symptom selected from the group consisting of: AIDS, meningitis, Dengue, EBV, and hepatitis (e.g., hepatitis B). In another specific embodiment, the compositions of the invention are used as an adjuvant to enhance an immune response to a virus, disease, or symptom selected from the group consisting of: HIV/AIDS, respiratory syncytial virus, Dengue, rotavirus, Japanese B encephalitis, influenza A and B, parainfluenza, measles, cytomegalovirus, rabies, Junin, Chikungunya, Rift Valley Fever, herpes simplex, and yellow fever.

[0534] In another specific embodiment, polypeptides, antibodies, polynucleotides and/or agonists or antagonists of the present invention are used as an adjuvant to enhance anti-bacterial or anti-fungal immune responses. Anti-bacterial or anti-fungal immune responses that may be enhanced using the compositions of the invention as an adjuvant, include bacteria or fungus and bacteria or fungus associated diseases or symptoms described herein or otherwise known in the art. In specific embodiments, the compositions of the invention are used as an adjuvant to enhance an immune response to a bacteria or fungus, disease, or symptom selected from the group consisting of: tetanus, Diphtheria, botulism, and meningitis type B.

[0535] In another specific embodiment, the compositions of the invention are used as an adjuvant to enhance an immune response to a bacteria or fungus, disease, or symptom selected from the group consisting of: Vibrio cholerae, Mycobacterium leprae, Salmonella typhi, Salmonella paratyphi, Meisseria meningitidis, Streptococcus pneumoniae, Group B streptococcus, Shigella spp., Enterotoxigenic Escherichia coli, Enterohemorrhagic E. coli, and Borrelia burgdorferi.

[0536] In another specific embodiment, polypeptides, antibodies, polynucleotides and/or agonists or antagonists of the present invention are used as an adjuvant to enhance anti-parasitic immune responses. Anti-parasitic immune responses that may be enhanced using the compositions of the invention as an adjuvant, include parasite and parasite associated diseases or symptoms described herein or otherwise known in the art. In specific embodiments, the compositions of the invention are used as an adjuvant to enhance an immune response to a parasite. In another specific embodiment, the compositions of the invention are used as an adjuvant to enhance an immune response to Plasmodium (malaria) or Leishmania.

[0537] In another specific embodiment, polypeptides, antibodies, polynucleotides and/or agonists or antagonists of the present invention may also be employed to treat infectious diseases including silicosis, sarcoidosis, and idiopathic pulmonary fibrosis; for example, by preventing the recruitment and activation of mononuclear phagocytes.

[0538] In another specific embodiment, polypeptides, antibodies, polynucleotides and/or agonists or antagonists of the present invention are used as an antigen for the generation of antibodies to inhibit or enhance immune mediated responses against polypeptides of the invention.

[0539] In one embodiment, polypeptides, antibodies, polynucleotides and/or agonists or antagonists of the present invention are administered to an animal (e.g., mouse, rat, rabbit, hamster, guinea pig, pigs, micro-pig, chicken, camel, goat, horse, cow, sheep, dog, cat, non-human primate, and human, most preferably human) to boost the immune system to produce increased quantities of one or more antibodies (e.g., IgG, IgA, IgM, and IgE), to induce higher affinity antibody production and immunoglobulin class switching (e.g., IgG, IgA, IgM, and IgE), and/or to increase an immune response.

[0540] In another specific embodiment, polypeptides, antibodies, polynucleotides and/or agonists or antagonists of the present invention are used as a stimulator of B cell responsiveness to pathogens.

[0541] In another specific embodiment, polypeptides, antibodies, polynucleotides and/or agonists or antagonists of the present invention are used as an activator of T cells.

[0542] In another specific embodiment, polypeptides, antibodies, polynucleotides and/or agonists or antagonists of the present invention are used as an agent that elevates the immune status of an individual prior to their receipt of immunosuppressive therapies.

[0543] In another specific embodiment, polypeptides, antibodies, polynucleotides and/or agonists or antagonists of the present invention are used as an agent to induce higher affinity antibodies.

[0544] In another specific embodiment, polypeptides, antibodies, polynucleotides and/or agonists or antagonists of the present invention are used as an agent to increase serum immunoglobulin concentrations.

[0545] In another specific embodiment, polypeptides, antibodies, polynucleotides and/or agonists or antagonists of the present invention are used as an agent to accelerate recovery of immunocompromised individuals.

[0546] In another specific embodiment, polypeptides, antibodies, polynucleotides and/or agonists or antagonists of the present invention are used as an agent to boost immunoresponsiveness among aged populations and/or neonates.

[0547] In another specific embodiment, polypeptides, antibodies, polynucleotides and/or agonists or antagonists of the present invention are used as an immune system enhancer prior to, during, or after bone marrow transplant and/or other transplants (e.g., allogeneic or xenogeneic organ transplantation). With respect to transplantation, compositions of the invention may be administered prior to, concomitant with, and/or after transplantation. In a specific embodiment, compositions of the invention are administered after transplantation, prior to the beginning of recovery of T-cell populations. In another specific embodiment, compositions of the invention are first administered after transplantation after the beginning of recovery of T cell populations, but prior to full recovery of B cell populations.

[0548] In another specific embodiment, polypeptides, antibodies, polynucleotides and/or agonists or antagonists of the present invention are used as an agent to boost immunoresponsiveness among individuals having an acquired loss of B cell function. Conditions resulting in an acquired loss of B cell function that may be ameliorated or treated by administering the polypeptides, antibodies, polynucleotides and/or agonists or antagonists thereof, include, but are not limited to, HIV Infection, AIDS, bone marrow transplant, and B cell chronic lymphocytic leukemia (CLL).

[0549] In another specific embodiment, polypeptides, antibodies, polynucleotides and/or agonists or antagonists of the present invention are used as an agent to boost immunoresponsiveness among individuals having a temporary immune deficiency. Conditions resulting in a temporary immune deficiency that may be ameliorated or treated by administering the polypeptides, antibodies, polynucleotides and/or agonists or antagonists thereof, include, but are not limited to, recovery from viral infections (e.g., influenza), conditions associated with malnutrition, recovery from infectious mononucleosis, or conditions associated with stress, recovery from measles, recovery from blood transfusion, and recovery from surgery.

[0550] In another specific embodiment, polypeptides, antibodies, polynucleotides and/or agonists or antagonists of the present invention are used as a regulator of antigen presentation by monocytes, dendritic cells, and/or B-cells. In one embodiment, polynucleotides, polypeptides, antibodies, and/or agonists or antagonists of the present invention enhance antigen presentation or antagonizes antigen presentation in vitro or in vivo. Moreover, in related embodiments, said enhancement or antagonism of antigen presentation may be useful as an anti-tumor treatment or to modulate the immune system.

[0551] In another specific embodiment, polypeptides, antibodies, polynucleotides and/or agonists or antagonists of the present invention are used as an agent to direct an individual's immune system towards development of a humoral response (i.e. TH2) as opposed to a TH1 cellular response.

[0552] In another specific embodiment, polypeptides, antibodies, polynucleotides and/or agonists or antagonists of the present invention are used as a means to induce tumor proliferation and thus make it more susceptible to anti-neoplastic agents. For example, multiple myeloma is a slowly dividing disease and is thus refractory to virtually all anti-neoplastic regimens. If these cells were forced to proliferate more rapidly their susceptibility profile would likely change.

[0553] In another specific embodiment, polypeptides, antibodies, polynucleotides and/or agonists or antagonists of the present invention are used as a stimulator of B cell production in pathologies such as AIDS, chronic lymphocyte disorder and/or Common Variable Immunodificiency.

[0554] In another specific embodiment, polypeptides, antibodies, polynucleotides and/or agonists or antagonists of the present invention are used as a therapy for generation and/or regeneration of lymphoid tissues following surgery, trauma or genetic defect. In another specific embodiment, polypeptides, antibodies, polynucleotides and/or agonists or antagonists of the present invention are used in the pretreatment of bone marrow samples prior to transplant.

[0555] In another specific embodiment, polypeptides, antibodies, polynucleotides and/or agonists or antagonists of the present invention are used as a gene-based therapy for genetically inherited disorders resulting in immuno-incompetence/immunodeficiency such as observed among SCID patients.

[0556] In another specific embodiment, polypeptides, antibodies, polynucleotides and/or agonists or antagonists of the present invention are used as a means of activating monocytes/macrophages to defend against parasitic diseases that effect monocytes such as Leishmania.

[0557] In another specific embodiment, polypeptides, antibodies, polynucleotides and/or agonists or antagonists of the present invention are used as a means of regulating secreted cytokines that are elicited by polypeptides of the invention.

[0558] In another embodiment, polypeptides, antibodies, polynucleotides and/or agonists or antagonists of the present invention are used in one or more of the applications decribed herein, as they may apply to veterinary medicine.

[0559] In another specific embodiment, polypeptides, antibodies, polynucleotides and/or agonists or antagonists of the present invention are used as a means of blocking various aspects of immune responses to foreign agents or self. Examples of diseases or conditions in which blocking of certain aspects of immune responses may be desired include autoimmune disorders such as lupus, and arthritis, as well as immunoresponsiveness to skin allergies, inflammation, bowel disease, injury and diseases/disorders associated with pathogens.

[0560] In another specific embodiment, polypeptides, antibodies, polynucleotides and/or agonists or antagonists of the present invention are used as a therapy for preventing the B cell proliferation and Ig secretion associated with autoimmune diseases such as idiopathic thrombocytopenic purpura, systemic lupus erythematosus and multiple sclerosis.

[0561] In another specific embodiment, polypeptides, antibodies, polynucleotides and/or agonists or antagonists of the present invention are used as a inhibitor of B and/or T cell migration in endothelial cells. This activity disrupts tissue architecture or cognate responses and is useful, for example in disrupting immune responses, and blocking sepsis.

[0562] In another specific embodiment, polypeptides, antibodies, polynucleotides and/or agonists or antagonists of the present invention are used as a therapy for chronic hypergammaglobulinemia evident in such diseases as monoclonal gammopathy of undetermined significance (MGUS), Waldenstrom's disease, related idiopathic monoclonal gammopathies, and plasmacytomas.

[0563] In another specific embodiment, polypeptides, antibodies, polynucleotides and/or agonists or antagonists of the present invention may be employed for instance to inhibit polypeptide chemotaxis and activation of macrophages and their precursors, and of neutrophils, basophils, B lymphocytes and some T-cell subsets, e.g., activated and CD8 cytotoxic T cells and natural killer cells, in certain autoimmune and chronic inflammatory and infective diseases. Examples of autoimmune diseases are described herein and include multiple sclerosis, and insulin-dependent diabetes.

[0564] The polypeptides, antibodies, polynucleotides and/or agonists or antagonists of the present invention may also be employed to treat idiopathic hypereosinophilic syndrome by, for example, preventing eosinophil production and migration.

[0565] In another specific embodiment, polypeptides, antibodies, polynucleotides and/or agonists or antagonists of the present invention are used to enhance or inhibit complement mediated cell lysis.

[0566] In another specific embodiment, polypeptides, antibodies, polynucleotides and/or agonists or antagonists of the present invention are used to enhance or inhibit antibody dependent cellular cytotoxicity.

[0567] In another specific embodiment, polypeptides, antibodies, polynucleotides and/or agonists or antagonists of the present invention may also be employed for treating atherosclerosis, for example, by preventing monocyte infiltration in the artery wall.

[0568] In another specific embodiment, polypeptides, antibodies, polynucleotides and/or agonists or antagonists of the present invention may be employed to treat adult respiratory distress syndrome (ARDS).

[0569] In another specific embodiment, polypeptides, antibodies, polynucleotides and/or agonists or antagonists of the present invention may be useful for stimulating wound and tissue repair, stimulating angiogenesis, and/or stimulating the repair of vascular or lymphatic diseases or disorders. Additionally, agonists and antagonists of the invention may be used to stimulate the regeneration of mucosal surfaces.

[0570] In a specific embodiment, polynucleotides or polypeptides, and/or agonists thereof are used to diagnose, prognose, treat, and/or prevent a disorder characterized by primary or acquired immunodeficiency, deficient serum immunoglobulin production, recurrent infections, and/or immune system dysfunction. Moreover, polynucleotides or polypeptides, and/or agonists thereof may be used to treat or prevent infections of the joints, bones, skin, and/or parotid glands, blood-borne infections (e.g., sepsis, meningitis, septic arthritis, and/or osteomyelitis), autoimmune diseases (e.g., those disclosed herein), inflammatory disorders, and malignancies, and/or any disease or disorder or condition associated with these infections, diseases, disorders and/or malignancies) including, but not limited to, CVID, other primary immune deficiencies, HIV disease, CLL, recurrent bronchitis, sinusitis, otitis media, conjunctivitis, pneumonia, hepatitis, meningitis, herpes zoster (e.g., severe herpes zoster), and/or pneumocystis carnii. Other diseases and disorders that may be prevented, diagnosed, prognosed, and/or treated with polynucleotides or polypeptides, and/or agonists of the present invention include, but are not limited to, HIV infection, HTLV-BLV infection, lymphopenia, phagocyte bactericidal dysfunction anemia, thrombocytopenia, and hemoglobinuria.

[0571] In another embodiment, polynucleotides, polypeptides, antibodies, and/or agonists or antagonists of the present invention are used to treat, and/or diagnose an individual having common variable immunodeficiency disease (“CVID”; also known as “acquired agammaglobulinemia” and “acquired hypogammaglobulinemia”) or a subset of this disease.

[0572] In a specific embodiment, polynucleotides, polypeptides, antibodies, and/or agonists or antagonists of the present invention may be used to diagnose, prognose, prevent, and/or treat cancers or neoplasms including immune cell or immune tissue-related cancers or neoplasms. Examples of cancers or neoplasms that may be prevented, diagnosed, or treated by polynucleotides, polypeptides, antibodies, and/or agonists or antagonists of the present invention include, but are not limited to, acute myelogenous leukemia, chronic myelogenous leukemia, Hodgkin's disease, non-Hodgkin's lymphoma, acute lymphocytic anemia (ALL) Chronic lymphocyte leukemia, plasmacytomas, multiple myeloma, Burkitt's lymphoma, EBV-transformed diseases, and/or diseases and disorders described in the section entitled “Hyperproliferative Disorders” elsewhere herein.

[0573] In another specific embodiment, polypeptides, antibodies, polynucleotides and/or agonists or antagonists of the present invention are used as a therapy for decreasing cellular proliferation of Large B-cell Lymphomas.

[0574] In another specific embodiment, polypeptides, antibodies, polynucleotides and/or agonists or antagonists of the present invention are used as a means of decreasing the involvement of B cells and Ig associated with Chronic Myelogenous Leukemia.

[0575] In specific embodiments, the compositions of the invention are used as an agent to boost immunoresponsiveness among B cell immunodeficient individuals, such as, for example, an individual who has undergone a partial or complete splenectomy.

[0576] Antagonists of the invention include, for example, binding and/or inhibitory antibodies, antisense nucleic acids, ribozymes or soluble forms of the polypeptides of the present invention (e.g., Fc fusion protein; see, e.g., Example 9). Agonists of the invention include, for example, binding or stimulatory antibodies, and soluble forms of the polypeptides (e.g., Fc fusion proteins; see, e.g., Example 9). Polypeptides, antibodies, polynucleotides and/or agonists or antagonists of the present invention may be employed in a composition with a pharmaceutically acceptable carrier, e.g., as described herein.

[0577] In another embodiment, polypeptides, antibodies, polynucleotides and/or agonists or antagonists of the present invention are administered to an animal (including, but not limited to, those listed above, and also including transgenic animals) incapable of producing functional endogenous antibody molecules or having an otherwise compromised endogenous immune system, but which is capable of producing human immunoglobulin molecules by means of a reconstituted or partially reconstituted immune system from another animal (see, e.g., published PCT Application Nos. WO98/24893, WO/9634096, WO/9633735, and WO/9110741). Administration of polypeptides, antibodies, polynucleotides and/or agonists or antagonists of the present invention to such animals is useful for the generation of monoclonal antibodies against the polypeptides, antibodies, polynucleotides and/or agonists or antagonists of the present invention.

[0578] Blood-Related Disorders

[0579] The polynucleotides, polypeptides, antibodies, and/or agonists or antagonists of the present invention may be used to modulate hemostatic (the stopping of bleeding) or thrombolytic (clot dissolving) activity. For example, by increasing hemostatic or thrombolytic activity, polynucleotides or polypeptides, and/or agonists or antagonists of the present invention could be used to treat or prevent blood coagulation diseases, disorders, and/or conditions (e.g., afibrinogenemia, factor deficiencies, hemophilia), blood platelet diseases, disorders, and/or conditions (e.g., thrombocytopenia), or wounds resulting from trauma, surgery, or other causes. Alternatively, polynucleotides, polypeptides, antibodies, and/or agonists or antagonists of the present invention that can decrease hemostatic or thrombolytic activity could be used to inhibit or dissolve clotting. These molecules could be important in the treatment or prevention of heart attacks (infarction), strokes, or scarring.

[0580] In specific embodiments, the polynucleotides, polypeptides, antibodies, and/or agonists or antagonists of the present invention may be used to prevent, diagnose, prognose, and/or treat thrombosis, arterial thrombosis, venous thrombosis, thromboembolism, pulmonary embolism, atherosclerosis, myocardial infarction, transient ischemic attack, unstable angina. In specific embodiments, the polynucleotides, polypeptides, antibodies, and/or agonists or antagonists of the present invention may be used for the prevention of occulsion of saphenous grafts, for reducing the risk of periprocedural thrombosis as might accompany angioplasty procedures, for reducing the risk of stroke in patients with atrial fibrillation including nonrheumatic atrial fibrillation, for reducing the risk of embolism associated with mechanical heart valves and or mitral valves disease. Other uses for the polynucleotides, polypeptides, antibodies, and/or agonists or antagonists of the present invention, include, but are not limited to, the prevention of occlusions in extrcorporeal devices (e.g., intravascular canulas, vascular access shunts in hemodialysis patients, hemodialysis machines, and cardiopulmonary bypass machines).

[0581] In another embodiment, a polypeptide of the invention, or polynucleotides, antibodies, agonists, or antagonists corresponding to that polypeptide, may be used to prevent, diagnose, prognose, and/or treat diseases and disorders of the blood and/or blood forming organs associated with the tissue(s) in which the polypeptide of the invention is expressed, including one, two, three, four, five, or more tissues disclosed in Table 1A, column 7 (Tissue Distribution Library Code).

[0582] The polynucleotides, polypeptides, antibodies, and/or agonists or antagonists of the present invention may be used to modulate hematopoietic activity (the formation of blood cells). For example, the polynucleotides, polypeptides, antibodies, and/or agonists or antagonists of the present invention may be used to increase the quantity of all or subsets of blood cells, such as, for example, erythrocytes, lymphocytes (B or T cells), myeloid cells (e.g., basophils, eosinophils, neutrophils, mast cells, macrophages) and platelets. The ability to decrease the quantity of blood cells or subsets of blood cells may be useful in the prevention, detection, diagnosis and/or treatment of anemias and leukopenias described below. Alternatively, the polynucleotides, polypeptides, antibodies, and/or agonists or antagonists of the present invention may be used to decrease the quantity of all or subsets of blood cells, such as, for example, erythrocytes, lymphocytes (B or T cells), myeloid cells (e.g., basophils, eosinophils, neutrophils, mast cells, macrophages) and platelets. The ability to decrease the quantity of blood cells or subsets of blood cells may be useful in the prevention, detection, diagnosis and/or treatment of leukocytoses, such as, for example eosinophilia.

[0583] The polynucleotides, polypeptides, antibodies, and/or agonists or antagonists of the present invention may be used to prevent, treat, or diagnose blood dyscrasia.

[0584] Anemias are conditions in which the number of red blood cells or amount of hemoglobin (the protein that carries oxygen) in them is below normal. Anemia may be caused by excessive bleeding, decreased red blood cell production, or increased red blood cell destruction (hemolysis). The polynucleotides, polypeptides, antibodies, and/or agonists or antagonists of the present invention may be useful in treating, preventing, and/or diagnosing anemias. Anemias that may be treated prevented or diagnosed by the polynucleotides, polypeptides, antibodies, and/or agonists or antagonists of the present invention include iron deficiency anemia, hypochromic anemia, microcytic anemia, chlorosis, hereditary siderob;astic anemia, idiopathic acquired sideroblastic anemia, red cell aplasia, megaloblastic anemia (e.g., pernicious anemia, (vitamin B12 deficiency) and folic acid deficiency anemia), aplastic anemia, hemolytic anemias (e.g., autoimmune helolytic anemia, microangiopathic hemolytic anemia, and paroxysmal nocturnal hemoglobinuria). The polynucleotides, polypeptides, antibodies, and/or agonists or antagonists of the present invention may be useful in treating, preventing, and/or diagnosing anemias associated with diseases including but not limited to, anemias associated with systemic lupus erythematosus, cancers, lymphomas, chronic renal disease, and enlarged spleens. The polynucleotides, polypeptides, antibodies, and/or agonists or antagonists of the present invention may be useful in treating, preventing, and/or diagnosing anemias arising from drug treatments such as anemias associated with methyldopa, dapsone, and/or sulfadrugs. Additionally, rhe polynucleotides, polypeptides, antibodies, and/or agonists or antagonists of the present invention may be useful in treating, preventing, and/or diagnosing anemias associated with abnormal red blood cell architecture including but not limited to, hereditary spherocytosis, hereditary elliptocytosis, glucose-6-phosphate dehydrogenase deficiency, and sickle cell anemia.

[0585] The polynucleotides, polypeptides, antibodies, and/or agonists or antagonists of the present invention may be useful in treating, preventing, and/or diagnosing hemoglobin abnormalities, (e.g., those associated with sickle cell anemia, hemoglobin C disease, hemoglobin S-C disease, and hemoglobin E disease). Additionally, the polynucleotides, polypeptides, antibodies, and/or agonists or antagonists of the present invention may be useful in diagnosing, prognosing, preventing, and/or treating thalassemias, including, but not limited to major and minor forms of alpha-thalassemia and beta-thalassemia.

[0586] In another embodiment, the polynucleotides, polypeptides, antibodies, and/or agonists or antagonists of the present invention may be useful in diagnosing, prognosing, preventing, and/or treating bleeding disorders including, but not limited to, thrombocytopenia (e.g., idiopathic thrombocytopenic purpura, and thrombotic thrombocytopenic purpura), Von Willebrand's disease, hereditary platelet disorders (e.g., storage pool disease such as Chediak-Higashi and Hermansky-Pudlak syndromes, thromboxane A2 dysfunction, thromboasthenia, and Bernard-Soulier syndrome), hemolytic-uremic syndrome, hemophelias such as hemophelia A or Factor VII deficiency and Christmas disease or Factor IX deficiency, Hereditary Hemorhhagic Telangiectsia, also known as Rendu-Osler-Weber syndrome, allergic purpura (Henoch Schonlein purpura) and disseminated intravascular coagulation.

[0587] The effect of the polynucleotides, polypeptides, antibodies, and/or agonists or antagonists of the present invention on the clotting time of blood may be monitored using any of the clotting tests known in the art including, but not limited to, whole blood partial thromboplastin time (PTT), the activated partial thromboplastin time (aPTT), the activated clotting time (ACT), the recalcified activated clotting time, or the Lee-White Clotting time.

[0588] Several diseases and a variety of drugs can cause platelet dysfunction. Thus, in a specific embodiment, the polynucleotides, polypeptides, antibodies, and/or agonists or antagonists of the present invention may be useful in diagnosing, prognosing, preventing, and/or treating acquired platelet dysfunction such as platelet dysfunction accompanying kidney failure, leukemia, multiple myeloma, cirrhosis of the liver, and systemic lupus erythematosus as well as platelet dysfunction associated with drug treatments, including treatment with aspirin, ticlopidine, nonsteroidal anti-inflammatory drugs (used for arthritis, pain, and sprains), and penicillin in high doses.

[0589] In another embodiment, the polynucleotides, polypeptides, antibodies, and/or agonists or antagonists of the present invention may be useful in diagnosing, prognosing, preventing, and/or treating diseases and disorders characterized by or associated with increased or decreased numbers of white blood cells. Leukopenia occurs when the number of white blood cells decreases below normal. Leukopenias include, but are not limited to, neutropenia and lymphocytopenia. An increase in the number of white blood cells compared to normal is known as leukocytosis. The body generates increased numbers of white blood cells during infection. Thus, leukocytosis may simply be a normal physiological parameter that reflects infection. Alternatively, leukocytosis may be an indicator of injury or other disease such as cancer. Leokocytoses, include but are not limited to, eosinophilia, and accumulations of macrophages. In specific embodiments, the polynucleotides, polypeptides, antibodies, and/or agonists or antagonists of the present invention may be useful in diagnosing, prognosing, preventing, and/or treating leukopenia. In other specific embodiments, the polynucleotides, polypeptides, antibodies, and/or agonists or antagonists of the present invention may be useful in diagnosing, prognosing, preventing, and/or treating leukocytosis

[0590] Leukopenia may be a generalized decreased in all types of white blood cells, or may be a specific depletion of particular types of white blood cells. Thus, in specific embodiments, the polynucleotides, polypeptides, antibodies, and/or agonists or antagonists of the present invention may be useful in diagnosing, prognosing, preventing, and/or treating decreases in neutrophil numbers, known as neutropenia. Neutropenias that may be diagnosed, prognosed, prevented, and/or treated by the polynucleotides, polypeptides, antibodies, and/or agonists or antagonists of the present invention include, but are not limited to, infantile genetic agranulocytosis, familial neutropenia, cyclic neutropenia, neutropenias resulting from or associated with dietary deficiencies (e.g., vitamin B 12 deficiency or folic acid deficiency), neutropenias resulting from or associated with drug treatments (e.g., antibiotic regimens such as penicillin treatment, sulfonamide treatment, anticoagulant treatment, anticonvulsant drugs, anti-thyroid drugs, and cancer chemotherapy), and neutropenias resulting from increased neutrophil destruction that may occur in association with some bacterial or viral infections, allergic disorders, autoimmune diseases, conditions in which an individual has an enlarged spleen (e.g., Felty syndrome, malaria and sarcoidosis), and some drug treatment regimens.

[0591] The polynucleotides, polypeptides, antibodies, and/or agonists or antagonists of the present invention may be useful in diagnosing, prognosing, preventing, and/or treating lymphocytopenias (decreased numbers of B and/or T lymphocytes), including, but not limited lymphocytopenias resulting from or associated with stress, drug treatments (e.g., drug treatment with corticosteroids, cancer chemotherapies, and/or radiation therapies), AIDS infection and/or other diseases such as, for example, cancer, rheumatoid arthritis, systemic lupus erythematosus, chronic infections, some viral infections and/or hereditary disorders (e.g., DiGeorge syndrome, Wiskott-Aldrich Syndome, severe combined immunodeficiency, ataxia telangiectsia).

[0592] The polynucleotides, polypeptides, antibodies, and/or agonists or antagonists of the present invention may be useful in diagnosing, prognosing, preventing, and/or treating diseases and disorders associated with macrophage numbers and/or macrophage function including, but not limited to, Gaucher's disease, Niemann-Pick disease, Letterer-Siwe disease and Hand-Schuller-Christian disease.

[0593] In another embodiment, the polynucleotides, polypeptides, antibodies, and/or agonists or antagonists of the present invention may be useful in diagnosing, prognosing, preventing, and/or treating diseases and disorders associated with eosinophil numbers and/or eosinophil function including, but not limited to, idiopathic hypereosinophilic syndrome, eosinophilia-myalgia syndrome, and Hand-Schuller-Christian disease.

[0594] In yet another embodiment, the polynucleotides, polypeptides, antibodies, and/or agonists or antagonists of the present invention may be useful in diagnosing, prognosing, preventing, and/or treating leukemias and lymphomas including, but not limited to, acute lymphocytic (lymphpblastic) leukemia (ALL), acute myeloid (myelocytic, myelogenous, myeloblastic, or myelomonocytic) leukemia, chronic lymphocytic leukemia (e.g., B cell leukemias, T cell leukemias, Sezary syndrome, and Hairy cell leukenia), chronic myelocytic (myeloid, myelogenous, or granulocytic) leukemia, Hodgkin's lymphoma, non-hodgkin's lymphoma, Burkitt's lymphoma, and mycosis fungoides.

[0595] In other embodiments, the polynucleotides, polypeptides, antibodies, and/or agonists or antagonists of the present invention may be useful in diagnosing, prognosing, preventing, and/or treating diseases and disorders of plasma cells including, but not limited to, plasma cell dyscrasias, monoclonal gammaopathies, monoclonal gammopathies of undetermined significance, multiple myeloma, macroglobulinemia, Waldenstrom's macroglobulinemia, cryoglobulinemia, and Raynaud's phenomenon.

[0596] In other embodiments, the polynucleotides, polypeptides, antibodies, and/or agonists or antagonists of the present invention may be useful in treating, preventing, and/or diagnosing myeloproliferative disorders, including but not limited to, polycythemia vera, relative polycythemia, secondary polycythemia, myelofibrosis, acute myelofibrosis, agnogenic myelod metaplasia, thrombocythemia, (including both primary and seconday thrombocythemia) and chronic myelocytic leukemia.

[0597] In other embodiments, the polynucleotides, polypeptides, antibodies, and/or agonists or antagonists of the present invention may be useful as a treatment prior to surgery, to increase blood cell production.

[0598] In other embodiments, the polynucleotides, polypeptides, antibodies, and/or agonists or antagonists of the present invention may be useful as an agent to enhance the migration, phagocytosis, superoxide production, antibody dependent cellular cytotoxicity of neutrophils, eosionophils and macrophages.

[0599] In other embodiments, the polynucleotides, polypeptides, antibodies, and/or agonists or antagonists of the present invention may be useful as an agent to increase the number of stem cells in circulation prior to stem cells pheresis. In another specific embodiment, the polynucleotides, polypeptides, antibodies, and/or agonists or antagonists of the present invention may be useful as an agent to increase the number of stem cells in circulation prior to platelet pheresis.

[0600] In other embodiments, the polynucleotides, polypeptides, antibodies, and/or agonists or antagonists of the present invention may be useful as an agent to increase cytokine production.

[0601] In other embodiments, the polynucleotides, polypeptides, antibodies, and/or agonists or antagonists of the present invention may be useful in preventing, diagnosing, and/or treating primary hematopoietic disorders.

[0602] Hyperproliferative Disorders

[0603] Colon associated polynucleotides or polypeptides, or agonists or antagonists thereof, can be used to treat, prevent, diagnose and/or prognose hyperproliferative diseases, disorders, and/or conditions, including neoplasms.

[0604] In a specific embodiment, colon associated polynucleotides or polypeptides, or agonists or antagonists thereof, can be used to treat, prevent, and/or diagnose hyperproliferative diseases, disorders, and/or conditions of the colon.

[0605] In a preferred embodiment, colon associated polynucleotides or polypeptides, or agonists or antagonists thereof, can be used to treat, prevent, and/or diagnose colon neoplasms.

[0606] Colon associated polynucleotides or polypeptides, or agonists or antagonists of the invention, may inhibit the proliferation of the disorder through direct or indirect interactions. Alternatively, colon associated polynucleotides or polypeptides, or agonists or antagonists thereof, may proliferate other cells, which can inhibit the hyperproliferative disorder.

[0607] For example, by increasing an immune response, particularly increasing antigenic qualities of the hyperproliferative disorder or by proliferating, differentiating, or mobilizing T-cells, hyperproliferative diseases, disorders, and/or conditions can be treated, prevented, and/or diagnosed. This immune response may be increased by either enhancing an existing immune response, or by initiating a new immune response. Alternatively, decreasing an immune response may also be a method of treating, preventing, and/or diagnosing hyperproliferative diseases, disorders, and/or conditions, such as a chemotherapeutic agent.

[0608] Examples of hyperproliferative diseases, disorders, and/or conditions that can be treated, prevented, and/or diagnosed by colon associated polynucleotides or polypeptides, or agonists or antagonists thereof, include, but are not limited to neoplasms located in the: prostate, colon, abdomen, bone, breast, digestive system, liver, pancreas, peritoneum, endocrine glands (adrenal, parathyroid, pituitary, testicles, ovary, thymus, thyroid), eye, head and neck, nervous (central and peripheral), lymphatic system, pelvic, skin, soft tissue, spleen, thoracic, and urogenital.

[0609] Similarly, other hyperproliferative disorders can also be treated or detected by polynucleotides or polypeptides, or agonists or antagonists of the present invention. Examples of such hyperproliferative disorders include, but are not limited to: Acute Childhood Lymphoblastic Leukemia, Acute Lymphoblastic Leukemia, Acute Lymphocytic Leukemia, Acute Myeloid Leukemia, Adrenocortical Carcinoma, Adult (Primary) Hepatocellular Cancer, Adult (Primary) Liver Cancer, Adult Acute Lymphocytic Leukemia, Adult Acute Myeloid Leukemia, Adult Hodgkin's Disease, Adult Hodgkin's Lymphoma, Adult Lymphocytic Leukemia, Adult Non-Hodgkin's Lymphoma, Adult Primary Liver Cancer, Adult Soft Tissue Sarcoma, AIDS-Related Lymphoma, AIDS-Related Malignancies, Anal Cancer, Astrocytoma, Bile Duct Cancer, Bladder Cancer, Bone Cancer, Brain Stem Glioma, Brain Tumors, Breast Cancer, Cancer of the Renal Pelvis and Ureter, Central Nervous System (Primary) Lymphoma, Central Nervous System Lymphoma, Cerebellar Astrocytoma, Cerebral Astrocytoma, Cervical Cancer, Childhood (Primary) Hepatocellular Cancer, Childhood (Primary) Liver Cancer, Childhood Acute Lymphoblastic Leukemia, Childhood Acute Myeloid Leukemia, Childhood Brain Stem Glioma, Childhood Cerebellar Astrocytoma, Childhood Cerebral Astrocytoma, Childhood Extracranial Germ Cell Tumors, Childhood Hodgkin's Disease, Childhood Hodgkin's Lymphoma, Childhood Hypothalamic and Visual Pathway Glioma, Childhood Lymphoblastic Leukemia, Childhood Medulloblastoma, Childhood Non-Hodgkin's Lymphoma, Childhood Pineal and Supratentorial Primitive Neuroectodermal Tumors, Childhood Primary Liver Cancer, Childhood Rhabdomyosarcoma, Childhood Soft Tissue Sarcoma, Childhood Visual Pathway and Hypothalamic Glioma, Chronic Lymphocytic Leukemia, Chronic Myelogenous Leukemia, Colon Cancer, Cutaneous T-Cell Lymphoma, Endocrine Pancreas Islet Cell Carcinoma, Endometrial Cancer, Ependymoma, Epithelial Cancer, Esophageal Cancer, Ewing's Sarcoma and Related Tumors, Exocrine Pancreatic Cancer, Extracranial Germ Cell Tumor, Extragonadal Germ Cell Tumor, Extrahepatic Bile Duct Cancer, Eye Cancer, Female Breast Cancer, Gaucher's Disease, Gallbladder Cancer, Gastric Cancer, Gastrointestinal Carcinoid Tumor, Gastrointestinal Tumors, Germ Cell Tumors, Gestational Trophoblastic Tumor, Hairy Cell Leukemia, Head and Neck Cancer, Hepatocellular Cancer, Hodgkin's Disease, Hodgkin's Lymphoma, Hypergammaglobulinemia, Hypopharyngeal Cancer, Intestinal Cancers, Intraocular Melanoma, Islet Cell Carcinoma, Islet Cell Pancreatic Cancer, Kaposi's Sarcoma, Kidney Cancer, Laryngeal Cancer, Lip and Oral Cavity Cancer, Liver Cancer, Lung Cancer, Lymphoproliferative Disorders, Macroglobulinemia, Male Breast Cancer, Malignant Mesothelioma, Malignant Thymoma, Medulloblastoma, Melanoma, Mesothelioma, Metastatic Occult Primary Squamous Neck Cancer, Metastatic Primary Squamous Neck Cancer, Metastatic Squamous Neck Cancer, Multiple Myeloma, Multiple Myeloma/Plasma Cell Neoplasm, Myelodysplastic Syndrome, Myelogenous Leukemia, Myeloid Leukemia, Myeloproliferative Disorders, Nasal Cavity and Paranasal Sinus Cancer, Nasopharyngeal Cancer, Neuroblastoma, Non-Hodgkin's Lymphoma During Pregnancy, Nonmelanoma Skin Cancer, Non-Small Cell Lung Cancer, Occult Primary Metastatic Squamous Neck Cancer, Oropharyngeal Cancer, Osteo-/Malignant Fibrous Sarcoma, Osteosarcoma/Malignant Fibrous Histiocytoma, Osteosarcoma/Malignant Fibrous Histiocytoma of Bone, Ovarian Epithelial Cancer, Ovarian Germ Cell Tumor, Ovarian Low Malignant Potential Tumor, Pancreatic Cancer, Paraproteinemias, Purpura, Parathyroid Cancer, Penile Cancer, Pheochromocytoma, Pituitary Tumor, Plasma Cell Neoplasm/Multiple Myeloma, Primary Central Nervous System Lymphoma, Primary Liver Cancer, Prostate Cancer, Rectal Cancer, Renal Cell Cancer, Renal Pelvis and Ureter Cancer, Retinoblastoma, Rhabdomyosarcoma, Salivary Gland Cancer, Sarcoidosis Sarcomas, Sezary Syndrome, Skin Cancer, Small Cell Lung Cancer, Small Intestine Cancer, Soft Tissue Sarcoma, Squamous Neck Cancer, Stomach Cancer, Supratentorial Primitive Neuroectodermal and Pineal Tumors, T-Cell Lymphoma, Testicular Cancer, Thymoma, Thyroid Cancer, Transitional Cell Cancer of the Renal Pelvis and Ureter, Transitional Renal Pelvis and Ureter Cancer, Trophoblastic Tumors, Ureter and Renal Pelvis Cell Cancer, Urethral Cancer, Uterine Cancer, Uterine Sarcoma, Vaginal Cancer, Visual Pathway and Hypothalamic Glioma, Vulvar Cancer, Waldenstrom's Macroglobulinemia, Wilms' Tumor, and any other hyperproliferative disease, besides neoplasia, located in an organ system listed above.

[0610] In another preferred embodiment, polynucleotides or polypeptides, or agonists or antagonists of the present invention are used to diagnose, prognose, prevent, and/or treat premalignant conditions and to prevent progression to a neoplastic or malignant state, including but not limited to those disorders described above. Such uses are indicated in conditions known or suspected of preceding progression to neoplasia or cancer, in particular, where non-neoplastic cell growth consisting of hyperplasia, metaplasia, or most particularly, dysplasia has occurred (for review of such abnormal growth conditions, see Robbins and Angell, 1976, Basic Pathology, 2d Ed., W. B. Saunders Co., Philadelphia, pp. 68-79.)

[0611] Hyperplasia is a form of controlled cell proliferation, involving an increase in cell number in a tissue or organ, without significant alteration in structure or function. Hyperplastic disorders which can be diagnosed, prognosed, prevented, and/or treated with compositions of the invention (including polynucleotides, polypeptides, agonists or antagonists) include, but are not limited to, angiofollicular mediastinal lymph node hyperplasia, angiolymphoid hyperplasia with eosinophilia, atypical melanocytic hyperplasia, basal cell hyperplasia, benign giant lymph node hyperplasia, cementum hyperplasia, congenital adrenal hyperplasia, congenital sebaceous hyperplasia, cystic hyperplasia, cystic hyperplasia of the breast, denture hyperplasia, ductal hyperplasia, endometrial hyperplasia, fibromuscular hyperplasia, focal epithelial hyperplasia, gingival hyperplasia, inflammatory fibrous hyperplasia, inflammatory papillary hyperplasia, intravascular papillary endothelial hyperplasia, nodular hyperplasia of prostate, nodular regenerative hyperplasia, pseudoepitheliomatous hyperplasia, senile sebaceous hyperplasia, and verrucous hyperplasia.

[0612] Metaplasia is a form of controlled cell growth in which one type of adult or fully differentiated cell substitutes for another type of adult cell. Metaplastic disorders which can be diagnosed, prognosed, prevented, and/or treated with compositions of the invention (including polynucleotides, polypeptides, agonists or antagonists) include, but are not limited to, agnogenic myeloid metaplasia, apocrine metaplasia, atypical metaplasia, autoparenchymatous metaplasia, connective tissue metaplasia, epithelial metaplasia, intestinal metaplasia, metaplastic anemia, metaplastic ossification, metaplastic polyps, myeloid metaplasia, primary myeloid metaplasia, secondary myeloid metaplasia, squamous metaplasia, squamous metaplasia of amni on, and symptomatic myeloid metaplasia.

[0613] Dysplasia is frequently a forerunner of cancer, and is found mainly in the epithelia; it is the most disorderly form of non-neoplastic cell growth, involving a loss in individual cell uniformity and in the architectural orientation of cells. Dysplastic cells often have abnormally large, deeply stained nuclei, and exhibit pleomorphism. Dysplasia characteristically occurs where there exists chronic irritation or inflammation. Dysplastic disorders which can be diagnosed, prognosed, prevented, and/or treated with compositions of the invention (including polynucleotides, polypeptides, agonists or antagonists) include, but are not limited to, anhidrotic ectodermal dysplasia, anterofacial dysplasia, asphyxiating thoracic dysplasia, atriodigital dysplasia, bronchopulmonary dysplasia, cerebral dysplasia, cervical dysplasia, chondroectodermal dysplasia, cleidocranial dysplasia, congenital ectodermal dysplasia, craniodiaphysial dysplasia, craniocarpotarsal dysplasia, craniometaphysial dysplasia, dentin dysplasia, diaphysial dysplasia, ectodermal dysplasia, enamel dysplasia, encephalo-ophthalmic dysplasia, dysplasia epiphysialis hemimelia, dysplasia epiphysialis multiplex, dysplasia epiphysialis punctata, epithelial dysplasia, faciodigitogenital dysplasia, familial fibrous dysplasia of jaws, familial white folded dysplasia, fibromuscular dysplasia, fibrous dysplasia of bone, florid osseous dysplasia, hereditary renal-retinal dysplasia, hidrotic ectodermal dysplasia, hypohidrotic ectodermal dysplasia, lymphopenic thymic dysplasia, mammary dysplasia, mandibulofacial dysplasia, metaphysial dysplasia, Mondini dysplasia, monostotic fibrous dysplasia, mucoepithelial dysplasia, multiple epiphysial dysplasia, oculoauriculovertebral dysplasia, oculodentodigital dysplasia, oculovertebral dysplasia, odontogenic dysplasia, ophthalmomandibulomelic dysplasia, periapical cemental dysplasia, polyostotic fibrous dysplasia, pseudoachondroplastic spondyloepiphysial dysplasia, retinal dysplasia, septo-optic dysplasia, spondyloepiphysial dysplasia, and ventriculoradial dysplasia.

[0614] Additional pre-neoplastic disorders which can be diagnosed, prognosed, prevented, and/or treated with compositions of the invention (including polynucleotides, polypeptides, agonists or antagonists) include, but are not limited to, benign dysproliferative disorders (e.g., benign tumors, fibrocystic conditions, tissue hypertrophy, intestinal polyps, colon polyps, and esophageal dysplasia), leukoplakia, keratoses, Bowen's disease, Farmer's Skin, solar cheilitis, and solar keratosis.

[0615] In another embodiment, a polypeptide of the invention, or polynucleotides, antibodies, agonists, or antagonists corresponding to that polypeptide, may be used to diagnose and/or prognose disorders associated with the tissue(s) in which the polypeptide of the invention is expressed, including one, two, three, four, five, or more tissues disclosed in Table 1A, 7 (Tissue Distribution Library Code).

[0616] In another embodiment, polynucleotides, polypeptides, antibodies, and/or agonists or antagonists of the present invention conjugated to a toxin or a radioactive isotope, as described herein, may be used to treat cancers and neoplasms, including, but not limited to those described herein. In a further preferred embodiment, polynucleotides, polypeptides, antibodies, and/or agonists or antagonists of the present invention conjugated to a toxin or a radioactive isotope, as described herein, may be used to treat acute myelogenous leukemia.

[0617] Additionally, polynucleotides, polypeptides, and/or agonists or antagonists of the invention may affect apoptosis, and therefore, would be useful in treating a number of diseases associated with increased cell survival or the inhibition of apoptosis. For example, diseases associated with increased cell survival or the inhibition of apoptosis that could be diagnosed, prognosed, prevented, and/or treated by polynucleotides, polypeptides, and/or agonists or antagonists of the invention, include cancers (such as follicular lymphomas, carcinomas with p53 mutations, and hormone-dependent tumors, including, but not limited to colon cancer, cardiac tumors, pancreatic cancer, melanoma, retinoblastoma, glioblastoma, lung cancer, intestinal cancer, testicular cancer, stomach cancer, neuroblastoma, myxoma, myoma, lymphoma, endothelioma, osteoblastoma, osteoclastoma, osteosarcoma, chondrosarcoma, adenoma, breast cancer, prostate cancer, Kaposi's sarcoma and ovarian cancer); autoimmune disorders such as, multiple sclerosis, Sjogren's syndrome, Hashimoto's thyroiditis, biliary cirrhosis, Behcet's disease, Crohn's disease, polymyositis, systemic lupus erythematosus and immune-related glomerulonephritis and rheumatoid arthritis) and viral infections (such as herpes viruses, pox viruses and adenoviruses), inflammation, graft v. host disease, acute graft rejection, and chronic graft rejection.

[0618] In preferred embodiments, polynucleotides, polypeptides, and/or agonists or antagonists of the invention are used to inhibit growth, progression, and/or metastasis of cancers, in particular those listed above.

[0619] Additional diseases or conditions associated with increased cell survival that could be diagnosed, prognosed, prevented, and/or treated by polynucleotides, polypeptides, and/or agonists or antagonists of the invention, include, but are not limited to, progression, and/or metastases of malignancies and related disorders such as leukemia (including acute leukemias (e.g., acute lymphocytic leukemia, acute myelocytic leukemia (including myeloblastic, promyelocytic, myelomonocytic, monocytic, and erythroleukemia)) and chronic leukemias (e.g., chronic myelocytic (granulocytic) leukemia and chronic lymphocytic leukemia)), polycythemia vera, lymphomas (e.g., Hodgkin's disease and non-Hodgkin's disease), multiple myeloma, Waldenstrom's macroglobulinemia, heavy chain disease, and solid tumors including, but not limited to, sarcomas and carcinomas such as fibrosarcoma, myxosarcoma, liposarcoma, chondrosarcoma, osteogenic sarcoma, chordoma, angiosarcoma, endotheliosarcoma, lymphangiosarcoma, lymphangioendotheliosarcoma, synovioma, mesothelioma, Ewing's tumor, leiomyosarcoma, rhabdomyosarcoma, colon carcinoma, pancreatic cancer, breast cancer, ovarian cancer, prostate cancer, squamous cell carcinoma, basal cell carcinoma, adenocarcinoma, sweat gland carcinoma, sebaceous gland carcinoma, papillary carcinoma, papillary adenocarcinomas, cystadenocarcinoma, medullary carcinoma, bronchogenic carcinoma, renal cell carcinoma, hepatoma, bile duct carcinoma, choriocarcinoma, seminoma, embryonal carcinoma, Wilm's tumor, cervical cancer, testicular tumor, lung carcinoma, small cell lung carcinoma, bladder carcinoma, epithelial carcinoma, glioma, astrocytoma, medulloblastoma, craniopharyngioma, ependymoma, pinealoma, emangioblastoma, acoustic neuroma, oligodendroglioma, menangioma, melanoma, neuroblastoma, and retinoblastoma.

[0620] Diseases associated with increased apoptosis that could be diagnosed, prognosed, prevented, and/or treated by polynucleotides, polypeptides, and/or agonists or antagonists of the invention, include AIDS; neurodegenerative disorders (such as Alzheimer's disease, Parkinson's disease, amyotrophic lateral sclerosis, retinitis pigmentosa, cerebellar degeneration and brain tumor or prior associated disease); autoimmune disorders (such as, multiple sclerosis, Sjogren's syndrome, Hashimoto's thyroiditis, biliary cirrhosis, Behcet's disease, Crohn's disease, polymyositis, systemic lupus erythematosus and immune-related glomerulonephritis and rheumatoid arthritis) myelodysplastic syndromes (such as aplastic anemia), graft v. host disease, ischemic injury (such as that caused by myocardial infarction, stroke and reperfusion injury), liver injury (e.g., hepatitis related liver injury, ischemia/reperfusion injury, cholestosis (bile duct injury) and liver cancer); toxin-induced liver disease (such as that caused by alcohol), septic shock, cachexia and anorexia.

[0621] Hyperproliferative diseases and/or disorders that could be diagnosed, prognosed, prevented, and/or treated by polynucleotides, polypeptides, and/or agonists or antagonists of the invention, include, but are not limited to, neoplasms located in the liver, abdomen, bone, breast, digestive system, pancreas, peritoneum, endocrine glands (adrenal, parathyroid, pituitary, testicles, ovary, thymus, thyroid), eye, head and neck, nervous system (central and peripheral), lymphatic system, pelvis, skin, soft tissue, spleen, thorax, and urogenital tract.

[0622] Similarly, other hyperproliferative disorders can also be diagnosed, prognosed, prevented, and/or treated by polynucleotides, polypeptides, and/or agonists or antagonists of the invention. Examples of such hyperproliferative disorders include, but are not limited to: hypergammaglobulinemia, lymphoproliferative disorders, paraproteinemias, purpura, sarcoidosis, Sezary Syndrome, Waldenstron's macroglobulinemia, Gaucher's Disease, histiocytosis, and any other hyperproliferative disease, besides neoplasia, located in an organ system listed above.

[0623] One preferred embodiment utilizes polynucleotides of the present invention to inhibit aberrant cellular division, by gene therapy using the present invention, and/or protein fusions or fragments thereof.

[0624] Thus, the present invention provides a method for treating cell proliferative diseases, disorders, and/or conditions by inserting into an abnormally proliferating cell a polynucleotide of the present invention, wherein said polynucleotide represses said cell proliferation, disease, disorder, and/or condition.

[0625] In a preferred embodiment, the present invention provides a method for treating cell proliferative diseases, disorders and/or conditions of the colon by inserting into a cell, a polynucleotide of the present invention, wherein said polynucleotide represses said cell proliferation, disease and/or disorder.

[0626] Another embodiment of the present invention provides a method of treating cell-proliferative diseases, disorders, and/or conditions in individuals comprising administration of one or more active gene copies of the present invention to an abnormally proliferating cell or cells. In a preferred embodiment, polynucleotides of the present invention is a DNA construct comprising a recombinant expression vector effective in expressing a DNA sequence encoding said polynucleotides. In another preferred embodiment of the present invention, the DNA construct encoding the polynucleotides of the present invention is inserted into cells to be treated utilizing a retrovirus, or more preferably an adenoviral vector (see, e.g., G J. Nabel, et. al., PNAS 96: 324-326 (1999), which is hereby incorporated by reference). In a most preferred embodiment, the viral vector is defective and will not transform non-proliferating cells, only proliferating cells. Moreover, in a preferred embodiment, the polynucleotides of the present invention inserted into proliferating cells either alone, or in combination with or fused to other polynucleotides, can then be modulated via an external stimulus (i.e., magnetic, specific small molecule, chemical, or drug administration, etc.), which acts upon the promoter upstream of said polynucleotides to induce expression of the encoded protein product. As such the beneficial therapeutic affect of the present invention may be expressly modulated (i.e., to increase, decrease, or inhibit expression of the present invention) based upon said external stimulus.

[0627] Polynucleotides of the present invention may be useful in repressing expression of oncogenic genes or antigens. By “repressing expression of the oncogenic genes ” is intended the suppression of the transcription of the gene, the degradation of the gene transcript (pre-message RNA), the inhibition of splicing, the destruction of the messenger RNA, the prevention of the post-translational modifications of the protein, the destruction of the protein, or the inhibition of the normal function of the protein.

[0628] For local administration to abnormally proliferating cells, polynucleotides of the present invention may be administered by any method known to those of skill in the art including, but not limited to transfection, electroporation, microinjection of cells, or in vehicles such as liposomes, lipofectin, or as naked polynucleotides, or any other method described throughout the specification. The polynucleotide of the present invention may be delivered by known gene delivery systems such as, but not limited to, retroviral vectors (Gilboa, J. Virology 44:845 (1982); Hocke, Nature 320:275 (1986); Wilson, et al., Proc. Natl. Acad. Sci. U.S.A. 85:3014), vaccinia virus system (Chakrabarty et al., Mol. Cell Biol. 5:3403 (1985) or other efficient DNA delivery systems (Yates et al., Nature 313:812 (1985)) known to those skilled in the art. These references are exemplary only and are hereby incorporated by reference. In order to specifically deliver or transfect cells which are abnormally proliferating and spare non-dividing cells, it is preferable to utilize a retrovirus, or adenoviral (as described in the art and elsewhere herein) delivery system known to those of skill in the art. Since host DNA replication is required for retroviral DNA to integrate and the retrovirus will be unable to self replicate due to the lack of the retrovirus genes needed for its life cycle. Utilizing such a retroviral delivery system for polynucleotides of the present invention will target said gene and constructs to abnormally proliferating cells and will spare the non-dividing normal cells.

[0629] The polynucleotides of the present invention may be delivered directly to cell proliferative disorder/disease sites in internal organs, body cavities and the like by use of imaging devices used to guide an injecting needle directly to the disease site. The polynucleotides of the present invention may also be administered to disease sites at the time of surgical intervention.

[0630] By “cell proliferative disease” is meant any human or animal disease or disorder, affecting any one or any combination of organs, cavities, or body parts, which is characterized by single or multiple local abnormal proliferations of cells, groups of cells, or tissues, whether benign or malignant.

[0631] Any amount of the polynucleotides of the present invention may be administered as long as it has a biologically inhibiting effect on the proliferation of the treated cells. Moreover, it is possible to administer more than one of the polynucleotide of the present invention simultaneously to the same site. By “biologically inhibiting” is meant partial or total growth inhibition as well as decreases in the rate of proliferation or growth of the cells. The biologically inhibitory dose may be determined by assessing the effects of the polynucleotides of the present invention on target malignant or abnormally proliferating cell growth in tissue culture, tumor growth in animals and cell cultures, or any other method known to one of ordinary skill in the art.

[0632] The present invention is further directed to antibody-based therapies which involve administering of anti-polypeptides and anti-polynucleotide antibodies to a mammalian, preferably human, patient for treating one or more of the described diseases, disorders, and/or conditions. Methods for producing anti-polypeptides and anti-polynucleotide antibodies polyclonal and monoclonal antibodies are described in detail elsewhere herein. Such antibodies may be provided in pharmaceutically acceptable compositions as known in the art or as described herein.

[0633] A summary of the ways in which the antibodies of the present invention may be used therapeutically includes binding polynucleotides or polypeptides of the present invention locally or systemically in the body or by direct cytotoxicity of the antibody, e.g., as mediated by complement (CDC) or by effector cells (ADCC). Some of these approaches are described in more detail below. Armed with the teachings provided herein, one of ordinary skill in the art will know how to use the antibodies of the present invention for diagnostic, monitoring or therapeutic purposes without undue experimentation.

[0634] In particular, the antibodies, fragments and derivatives of the present invention are useful for treating a subject having or developing cell proliferative and/or differentiation diseases, disorders, and/or conditions as described herein. Such treatment comprises administering a single or multiple doses of the antibody, or a fragment, derivative, or a conjugate thereof.

[0635] The antibodies of this invention may be advantageously utilized in combination with other monoclonal or chimeric antibodies, or with lymphokines or hematopoietic growth factors, for example, which serve to increase the number or activity of effector cells which interact with the antibodies.

[0636] It is preferred to use high affinity and/or potent in vivo inhibiting and/or neutralizing antibodies against polypeptides or polynucleotides of the present invention, fragments or regions thereof, for both immunoassays directed to and therapy of diseases, disorders, and/or conditions related to polynucleotides or polypeptides, including fragments thereof, of the present invention. Such antibodies, fragments, or regions, will preferably have an affinity for polynucleotides or polypeptides, including fragments thereof. Preferred binding affinities include those with a dissociation constant or Kd less than 5×10⁻⁶M, 10⁻⁶M, 5×10⁻⁷M, 10⁻⁷M, 5×10⁻⁸M, 10⁻⁸M, 5×10⁻⁹M, 10⁻⁹M, 5×10⁻¹⁰M, 10⁻¹⁰M, 5×10⁻¹¹M, 10⁻¹¹M, ×10⁻¹²M, 10⁻¹²M, 5×10⁻¹³M, 10⁻¹³M, 5×10⁻¹⁴M, 10⁻¹⁴M, 5×10⁻¹⁵M, and 10⁻¹⁵M.

[0637] Moreover, colon antigen polypeptides of the present invention or fragments thereof, are useful in inhibiting the angiogenesis of proliferative cells or tissues, either alone, as a protein fusion, or in combination with other polypeptides directly or indirectly, as described elsewhere herein. In a most preferred embodiment, said anti-angiogenesis effect may be achieved indirectly, for example, through the inhibition of hematopoietic, tumor-specific cells, such as tumor-associated macrophages (see, e.g., Joseph IB, et al. J Natl Cancer Inst, 90(21):1648-53 (1998), which is hereby incorporated by reference). Antibodies directed to polypeptides or polynucleotides of the present invention may also result in inhibition of angiogenesis directly, or indirectly (see, e.g., Witte L, et al., Cancer Metastasis Rev. 17(2):155-61 (1998), which is hereby incorporated by reference)).

[0638] Polypeptides, including protein fusions, of the present invention, or fragments thereof may be useful in inhibiting proliferative cells or tissues through the induction of apoptosis. Said polypeptides may act either directly, or indirectly to induce apoptosis of proliferative cells and tissues, for example in the activation of a death-domain receptor, such as tumor necrosis factor (TNF) receptor-1, CD95 (Fas/APO-1), TNF-receptor-related apoptosis-mediated protein (TRAMP) and TNF-related apoptosis-inducing ligand (TRAIL) receptor-1 and -2 (see, e.g., Schulze-Osthoff K, et.al., Eur J Biochem 254(3):439-59 (1998), which is hereby incorporated by reference). Moreover, in another preferred embodiment of the present invention, said polypeptides may induce apoptosis through other mechanisms, such as in the activation of other proteins which will activate apoptosis, or through stimulating the expression of said proteins, either alone or in combination with small molecule drugs or adjuvants, such as apoptonin, galectins, thioredoxins, antiinflammatory proteins (See for example, Mutat. Res. 400(1-2):447-55 (1998), Med Hypotheses.50(5):423-33 (1998), Chem. Biol. Interact. Apr 24;111-112:23-34 (1998), J. Mo. Med. 76(6):402-12 (1998), Int. J. Tissue React. 20(1):3-15 (1998), which are all hereby incorporated by reference).

[0639] Polypeptides, including protein fusions to, or fragments thereof, of the present invention are useful in inhibiting the metastasis of proliferative cells or tissues. Inhibition may occur as a direct result of administering polypeptides, or antibodies directed to said polypeptides as described elsewhere herein, or indirectly, such as activating the expression of proteins known to inhibit metastasis, for example alpha 4 integrins, (See, e.g., Curr Top Microbiol Immunol 1998;231:125-41, which is hereby incorporated by reference). Such therapeutic affects of the present invention may be achieved either alone, or in combination with small molecule drugs or adjuvants.

[0640] In another embodiment, the invention provides a method of delivering compositions containing the polypeptides of the invention (e.g., compositions containing polypeptides or anti- colon antigen polypeptide antibodies associated with heterologous polypeptides, heterologous nucleic acids, toxins, or prodrugs) to targeted cells expressing the polypeptide of the present invention. colon antigen polypeptides or anti- colon antigen polypeptide antibodies of the invention may be associated with heterologous polypeptides, heterologous nucleic acids, toxins, or prodrugs via hydrophobic, hydrophilic, ionic and/or covalent interactions.

[0641] Polypeptides, protein fusions to, or fragments thereof, of the present invention are useful in enhancing the immunogenicity and/or antigenicity of proliferating cells or tissues, either directly such as would occur if the polypeptides of the present invention ‘vaccinated’ the immune response to respond to proliferative antigens and immunogens, or indirectly, such as in activating the expression of proteins known to enhance the immune response (e.g. chemokines), to said antigens and immunogens.

[0642] Urinary System Disorders

[0643] Polynucleotides, polypeptides, antibodies, and/or agonists or antagonists of the present invention, may be used to treat, prevent, diagnose, and/or prognose disorders of the urinary system, including but not limited to disorders of the renal system, bladder, ureters, and urethra. Renal disorders include, but are not limited to, kidney failure, nephritis, blood vessel disorders of kidney, metabolic and congenital kidney disorders, urinary disorders of the kidney, autoimmune disorders, sclerosis and necrosis, electrolyte imbalance, and kidney cancers.

[0644] Kidney failure diseases include, but are not limited to, acute kidney failure, chronic kidney failure, atheroembolic renal failure, and end-stage renal disease. Inflammatory diseases of the kidney include acute glomerulonephritis, postinfectious glomerulonephritis, rapidly progressive glomerulonephritis, nephrotic syndrome, membranous glomerulonephritis, familial nephrotic syndrome, membranoproliferative glomerulonephritis I and II, mesangial proliferative glomerulonephritis, chronic glomerulonephritis, acute tubulointerstitial nephritis, chronic tubulointerstitial nephritis, acute post-streptococcal glomerulonephritis (PSGN), pyelonephritis, lupus nephritis, chronic nephritis, interstitial nephritis, and post-streptococcal glomerulonephritis.

[0645] Blood vessel disorders of the kidneys include, but are not limited to, kidney infarction, atheroembolic kidney disease, cortical necrosis, malignant nephrosclerosis, renal vein thrombosis, renal underperfusion, renal ischemia-reperfusion, renal artery embolism, and renal artery stenosis. Kidney disorders resulting form urinary tract problems include, but are not limited to, pyelonephritis, hydronephrosis, urolithiasis (renal lithiasis, nephrolithiasis), reflux nephropathy, urinary tract infections, urinary retention, and acute or chronic unilateral obstructive uropathy.

[0646] Metabolic and congenital disorders of the kidneys include, but are not limited to, renal tubular acidosis, renal glycosuria, nephrogenic diabetes insipidus, cystinuria, Fanconi's syndrome, vitamin D-resistant rickets, Hartnup disease, Bartter's syndrome, Liddle's syndrome, polycystic kidney disease, medullary cystic disease, medullary sponge kidney, Alport's syndrome, nail-patella syndrome, congenital nephrotic syndrome, CRUSH syndrome, horseshoe kidney, diabetic nephropathy, nephrogenic diabetes insipidus, analgesic nephropathy, kidney stones, and membranous nephropathy, Kidney disorders resulting from an autoimmune response include, but are not limited to, systemic lupus erythematosus (SLE), Goodpasture syndrome, IgA nephropathy, and IgM mesangial proliferative glomerulonephritis.

[0647] Sclerotic or necrotic disorders of the kidney include, but are not limited to, glomerulosclerosis, diabetic nephropathy, focal segmental glomerulosclerosis (FSGS), necrotizing glomerulonephritis, and renal papillary necrosis. Kidneys may also develop carcinomas, including, but not limited to, hypernephroma, nephroblastoma, renal cell cancer, transitional cell cancer, squamous cell cancer, and Wilm's tumor.

[0648] Kidney disorders may also result in electrolyte imbalances, including, but not limited to, nephrocalcinosis, pyuria, edema, hydronephritis, proteinuria, hyponatremia, hypernatremia, hypokalemia, hyperkalemia, hypocalcemia, hypercalcemia, hypophosphatemia, and hyperphosphatemia.

[0649] Bladder disorders include, but are not limited to, benign prostatic hyperplasia (BPH), interstitial cystitis (IC), prostatitis, proteinuria, urinary tract infections, urinary incontinence, urinary retention. Disorders of the ureters and urethra include, but are not limited to, acute or chronic unilateral obstructive uropathy. The bladder, ureters, and urethra may also develop carcinomas, including, but not limited to, superficial bladder canccer, invasive bladder cancer, carcinoma of the ureter, and urethra cancers.

[0650] Polypeptides may be administered using any method known in the art, including, but not limited to, direct needle injection at the delivery site, intravenous injection, topical administration, catheter infusion, biolistic injectors, particle accelerators, gelfoam sponge depots, other commercially available depot materials, osmotic pumps, oral or suppositorial solid pharmaceutical formulations, decanting or topical applications during surgery, aerosol delivery. Such methods are known in the art. Polypeptides may be administered as part of a Therapeutic, described in more detail below. Methods of delivering polynucleotides are described in more detail herein.

[0651] Cardiovascular Disorders

[0652] Polynucleotides or polypeptides, or agonists or antagonists of the present invention, may be used to treat, prevent, diagnose, and/or prognose cardiovascular disorders, including, but not limited to, peripheral artery disease, such as limb ischemia.

[0653] Cardiovascular disorders include cardiovascular abnormalities, such as arterio-arterial fistula, arteriovenous fistula, cerebral arteriovenous malformations, congenital heart defects, pulmonary atresia, and Scimitar Syndrome. Congenital heart defects include aortic coarctation, cor triatriatum, coronary vessel anomalies, crisscross heart, dextrocardia, patent ductus arteriosus, Ebstein's anomaly, Eisenmenger complex, hypoplastic left heart syndrome, levocardia, tetralogy of fallot, transposition of great vessels, double outlet right ventricle, tricuspid atresia, persistent truncus arteriosus, total anomalous pulmonary venous connection, hypoplastic left heart syndrome, and heart septal defects, such as aortopulmonary septal defect, endocardial cushion defects, Lutembacher's Syndrome, atrioventricular canal defect, trilogy of Fallot, ventricular heart septal defects.

[0654] Cardiovascular disorders also include heart disease, such as arrhythmias, carcinoid heart disease, high cardiac output, low cardiac output, cardiac tamponade, endocarditis (including bacterial), heart aneurysm, cardiac arrest, sudden cardiac death, congestive heart failure, congestive cardiomyopathy, paroxysmal dyspnea, cardiac edema, heart hypertrophy, congestive cardiomyopathy, left ventricular hypertrophy, right ventricular hypertrophy, post-infarction heart rupture, ventricular septal rupture, heart valve diseases, myocardial diseases, myocardial ischemia, pericardial effusion, pericarditis (including constrictive and tuberculous), pneumopericardium, postpericardiotomy syndrome, pulmonary heart disease, rheumatic heart disease, ventricular dysfunction, hyperemia, cardiovascular pregnancy complications, Scimitar Syndrome, diastolic dysfunction, enlarged heart, heart block, J-curve phenomenon, rheumatic heart disease, Marfan syndrome, cardiovascular syphilis, and cardiovascular tuberculosis.

[0655] Arrhythmias include sinus arrhythmia, atrial fibrillation, atrial flutter, bradycardia, extrasystole, Adams-Stokes Syndrome, bundle-branch block, sinoatrial block, long QT syndrome, parasystole, Lown-Ganong-Levine Syndrome, Mahaim-type pre-excitation syndrome, Wolff-Parkinson-White syndrome, sick sinus syndrome, tachycardias, and ventricular fibrillation. Tachycardias include paroxysmal tachycardia, supraventricular tachycardia, accelerated idioventricular rhythm, atrioventricular nodal reentry tachycardia, ectopic atrial tachycardia, ectopic junctional tachycardia, sinoatrial nodal reentry tachycardia, sinus tachycardia, Torsades de Pointes, and ventricular tachycardia.

[0656] Heart valve disease include aortic valve insufficiency, aortic valve stenosis, heart murmurs, aortic valve prolapse, mitral valve prolapse, tricuspid valve prolapse, mitral valve insufficiency, mitral valve stenosis, pulmonary atresia, pulmonary valve insufficiency, pulmonary valve stenosis, tricuspid atresia, tricuspid valve insufficiency, tricuspid valve stenosis, and bicuspid aortic valve.

[0657] Myocardial diseases include alcoholic cardiomyopathy, congestive cardiomyopathy, hypertrophic cardiomyopathy, aortic subvalvular stenosis, pulmonary subvalvular stenosis, restrictive cardiomyopathy, Chagas cardiomyopathy, endocardial fibroelastosis, endomyocardial fibrosis, Kearns Syndrome, Barth syndrome, myocardial reperfusion injury, and myocarditis.

[0658] Myocardial ischemias include coronary disease, such as angina pectoris, Prinzmetal's angina, unstable angina, coronary aneurysm, coronary arteriosclerosis, coronary thrombosis, coronary vasospasm, myocardial infarction and myocardial stunning.

[0659] Cardiovascular diseases also include vascular diseases such as aneurysms, angiodysplasia, angiomatosis, bacillary angiomatosis, Hippel-Lindau Disease, Klippel-Trenaunay-Weber Syndrome, Sturge-Weber Syndrome, angioneurotic edema, aortic diseases, Takayasu's Arteritis, aortitis, Leriche's Syndrome, arterial occlusive diseases, arteritis, enarteritis, polyarteritis nodosa, cerebrovascular disorders, diabetic angiopathies, diabetic retinopathy, embolisms, thrombosis, erythromelalgia, hemorrhoids, hepatic veno-occlusive disease, hypertension, hypotension (shock), ischemia, peripheral vascular diseases, phlebitis, superficial phlebitis, pulmonary veno-occlusive disease, chronic obstructive pulmonary disease, Buerger's disease, Raynaud's disease, CREST syndrome, retinal vein occlusion, Scimitar syndrome, superior vena cava syndrome, telangiectasia, atacia telangiectasia, hereditary hemorrhagic telangiectasia, deep vein thrombosis, varicocele, varicose veins, varicose ulcer, vasculitis, and venous insufficiency.

[0660] Aneurysms include dissecting aneurysms, false aneurysms, infected aneurysms, ruptured aneurysms, aortic aneurysms, cerebral aneurysms, coronary aneurysms, heart aneurysms, and iliac aneurysms.

[0661] Arterial occlusive diseases include arteriosclerosis, arteriolosclerosis, atherosclerosis, intermittent claudication, carotid stenosis, fibromuscular dysplasias, mesenteric vascular occlusion, Moyamoya disease, renal artery obstruction, retinal artery occlusion, and thromboangiitis obliterans.

[0662] Cerebrovascular disorders include carotid artery diseases, cerebral amyloid angiopathy, cerebral aneurysm, cerebral anoxia, cerebral arteriosclerosis, cerebral arteriovenous malformation, cerebral artery diseases, cerebral embolism and thrombosis, carotid artery thrombosis, sinus thrombosis, Wallenberg's syndrome, cerebral hemorrhage, epidural hematoma, subdural hematoma, subaraxhnoid hemorrhage, cerebral infarction, cerebral ischemia (including transient), subclavian steal syndrome, periventricular leukomalacia, vascular headache, cluster headache, migraine, and vertebrobasilar insufficiency.

[0663] Embolisms include air embolisms, amniotic fluid embolisms, cholesterol embolisms, blue toe syndrome, fat embolisms, pulmonary embolisms, and thromoboembolisms. Thrombosis include coronary thrombosis, hepatic vein thrombosis, deep vein thrombosis, retinal vein occlusion, carotid artery thrombosis, sinus thrombosis, Wallenberg's syndrome, and thrombophlebitis.

[0664] Ischemia includes cerebral ischemia, ischemic colitis, silent ischemia, compartment syndromes, anterior compartment syndrome, myocardial ischemia, reperfusion injuries, and peripheral limb ischemia. Vasculitis includes aortitis, arteritis, Behcet's Syndrome, Churg-Strauss Syndrome, mucocutaneous lymph node syndrome, thromboangiitis obliterans, hypersensitivity vasculitis, Schoenlein-Henoch purpura, allergic cutaneous vasculitis, and Wegener's granulomatosis.

[0665] Cardiovascular diseases can also occur due to electrolyte imbalances that include, but are not limited to hyponatremia, hypernatremia, hypokalemia, hyperkalemia, hypocalcemia, hypercalcemia, hypophosphatemia, and hyperphophatemia. Neoplasm and/or cancers of the cardiovascular system include, but are not limited to, myxomas, fibromas, and rhabdomyomas.

[0666] Polypeptides may be administered using any method known in the art, including, but not limited to, direct needle injection at the delivery site, intravenous injection, topical administration, catheter infusion, biolistic injectors, particle accelerators, gelfoam sponge depots, other commercially available depot materials, osmotic pumps, oral or suppositorial solid pharmaceutical formulations, decanting or topical applications during surgery, aerosol delivery. Such methods are known in the art. Polypeptides may be administered as part of a Therapeutic, described in more detail below. Methods of delivering polynucleotides are described in more detail herein.

[0667] Respiratory Disorders

[0668] Polynucleotides or polypeptides, or agonists or antagonists of the present invention may be used to treat, prevent, diagnose, and/or prognose diseases and/or disorders of the respiratory system.

[0669] Diseases and disorders of the respiratory system include, but are not limited to, nasal vestibulitis, nonallergic rhinitis (e.g., acute rhinitis, chronic rhinitis, atrophic rhinitis, vasomotor rhinitis), nasal polyps, and sinusitis, juvenile angiofibromas, cancer of the nose and juvenile papillomas, vocal cord polyps, nodules (singer's nodules), contact ulcers, vocal cord paralysis, laryngoceles, pharyngitis (e.g., viral and bacterial), tonsillitis, tonsillar cellulitis, parapharyngeal abscess, laryngitis, laryngoceles, and throat cancers (e.g., cancer of the nasopharynx, tonsil cancer, larynx cancer), lung cancer (e.g., squamous cell carcinoma, small cell (oat cell) carcinoma, large cell carcinoma, and adenocarcinoma), allergic disorders (eosinophilic pneumonia, hypersensitivity pneumonitis (e.g., extrinsic allergic alveolitis, allergic interstitial pneumonitis, organic dust pneumoconiosis, allergic bronchopulmonary aspergillosis, asthma, Wegener's granulomatosis (granulomatous vasculitis), Goodpasture's syndrome)), pneumonia (e.g., bacterial pneumonia (e.g., Streptococcus pneumoniae (pneumoncoccal pneumonia), Staphylococcus aureus (staphylococcal pneumonia), Gram-negative bacterial pneumonia (caused by, e.g., Klebsiella and Pseudomas spp.), Mycoplasma pneumoniae pneumonia, Hemophilus influenzae pneumonia, Legionella pneumophila (Legionnaires' disease), and Chlamydia psittaci (Psittacosis)), and viral pneumonia (e.g., influenza, chickenpox (varicella).

[0670] Additional diseases and disorders of the respiratory system include, but are not limited to bronchiolitis, polio (poliomyelitis), croup, respiratory syncytial viral infection, mumps, erythema infectiosum (fifth disease), roseola infantum, progressive rubella panencephalitis, german measles, and subacute sclerosing panencephalitis), fungal pneumonia (e.g., Histoplasmosis, Coccidioidomycosis, Blastomycosis, fungal infections in people with severely suppressed immune systems (e.g., cryptococcosis, caused by Cryptococcus neoformans; aspergillosis, caused by Aspergillus spp.; candidiasis, caused by Candida; and mucormycosis)), Pneumocystis carinii (pneumocystis pneumonia), atypical pneumonias (e.g., Mycoplasma and Chlamydia spp.), opportunistic infection pneumonia, nosocomial pneumonia, chemical pneumonitis, and aspiration pneumonia, pleural disorders (e.g., pleurisy, pleural effusion, and pneumothorax (e.g., simple spontaneous pneumothorax, complicated spontaneous pneumothorax, tension pneumothorax)), obstructive airway diseases (e.g., asthma, chronic obstructive pulmonary disease (COPD), emphysema, chronic or acute bronchitis), occupational lung diseases (e.g., silicosis, black lung (coal workers' pneumoconiosis), asbestosis, berylliosis, occupational asthsma, byssinosis, and benign pneumoconioses), Infiltrative Lung Disease (e.g., pulmonary fibrosis (e.g., fibrosing alveolitis, usual interstitial pneumonia), idiopathic pulmonary fibrosis, desquamative interstitial pneumonia, lymphoid interstitial pneumonia, histiocytosis X (e.g., Letterer-Siwe disease, Hand-Schuller-Christian disease, eosinophilic granuloma), idiopathic pulmonary hemosiderosis, sarcoidosis and pulmonary alveolar proteinosis), Acute respiratory distress syndrome (also called, e.g., adult respiratory distress syndrome), edema, pulmonary embolism, bronchitis (e.g., viral, bacterial), bronchiectasis, atelectasis, lung abscess (caused by, e.g., Staphylococcus aureus or Legionella pneumophila), and cystic fibrosis.

[0671] Anti-Angiogenesis Activity

[0672] The naturally occurring balance between endogenous stimulators and inhibitors of angiogenesis is one in which inhibitory influences predominate. Rastinejad et al., Cell 56:345-355 (1989). In those rare instances in which neovascularization occurs under normal physiological conditions, such as wound healing, organ regeneration, embryonic development, and female reproductive processes, angiogenesis is stringently regulated and spatially and temporally delimited. Under conditions of pathological angiogenesis such as that characterizing solid tumor growth, these regulatory controls fail. Unregulated angiogenesis becomes pathologic and sustains progression of many neoplastic and non-neoplastic diseases. A number of serious diseases are dominated by abnormal neovascularization including solid tumor growth and metastases, arthritis, some types of eye disorders, and psoriasis. See, e.g., reviews by Moses et al., Biotech. 9:630-634 (1991); Folkman et al., N. Engl. J. Med., 333:1757-1763 (1995); Auerbach et al., J. Microvasc. Res. 29:401-411 (1985); Folkman, Advances in Cancer Research, eds. Klein and Weinhouse, Academic Press, New York, pp. 175-203 (1985); Patz, Am. J. Opthalmol. 94:715-743 (1982); and Folkman et al., Science 221:719-725 (1983). In a number of pathological conditions, the process of angiogenesis contributes to the disease state. For example, significant data have accumulated which suggest that the growth of solid tumors is dependent on angiogenesis. Folkman and Klagsbrun, Science 235:442-447 (1987).

[0673] The present invention provides for treatment of diseases or disorders associated with neovascularization by administration of the polynucleotides and/or polypeptides of the invention, as well as agonists or antagonists of the present invention. Malignant and metastatic conditions which can be treated with the polynucleotides and polypeptides, or agonists or antagonists of the invention include, but are not limited to, malignancies, solid tumors, and cancers described herein and otherwise known in the art (for a review of such disorders, see Fishman et al., Medicine, 2d Ed., J. B. Lippincott Co., Philadelphia (1985)). Thus, the present invention provides a method of treating an angiogenesis-related disease and/or disorder, comprising administration to an individual in need thereof a therapeutically effective amount of a polynucleotide, polypeptide, antagonist and/or agonist of the invention. For example, polynucleotides, polypeptides, antagonists and/or agonists may be utilized in a variety of additional methods in order to therapeutically treat a cancer or tumor. Cancers which may be treated with polynucleotides, polypeptides, antagonists and/or agonists include, but are not limited to solid tumors, including prostate, lung, breast, ovarian, stomach, pancreas, larynx, esophagus, testes, liver, parotid, biliary tract, colon, rectum, cervix, uterus, endometrium, kidney, bladder, thyroid cancer; primary tumors and metastases; melanomas; glioblastoma; Kaposi's sarcoma; leiomyosarcoma; non-small cell lung cancer; colorectal cancer; advanced malignancies; and blood born tumors such as leukemias. For example, polynucleotides, polypeptides, antagonists and/or agonists may be delivered topically, in order to treat cancers such as skin cancer, head and neck tumors, breast tumors, and Kaposi's sarcoma.

[0674] Within yet other aspects, polynucleotides, polypeptides, antagonists and/or agonists may be utilized to treat superficial forms of bladder cancer by, for example, intravesical administration. Polynucleotides, polypeptides, antagonists and/or agonists may be delivered directly into the tumor, or near the tumor site, via injection or a catheter. Of course, as the artisan of ordinary skill will appreciate, the appropriate mode of administration will vary according to the cancer to be treated. Other modes of delivery are discussed herein.

[0675] Polynucleotides, polypeptides, antagonists and/or agonists may be useful in treating other disorders, besides cancers, which involve angiogenesis. These disorders include, but are not limited to: benign tumors, for example hemangiomas, acoustic neuromas, neurofibromas, trachomas, and pyogenic granulomas; artheroscleric plaques; ocular angiogenic diseases, for example, diabetic retinopathy, retinopathy of prematurity, macular degeneration, corneal graft rejection, neovascular glaucoma, retrolental fibroplasia, rubeosis, retinoblastoma, uvietis and Pterygia (abnormal blood vessel growth) of the eye; rheumatoid arthritis; psoriasis; delayed wound healing; endometriosis; vasculogenesis; granulations; hypertrophic scars (keloids); nonunion fractures; scleroderma; trachoma; vascular adhesions; myocardial angiogenesis; coronary collaterals; cerebral collaterals; arteriovenous malformations; ischemic limb angiogenesis; Osler-Webber Syndrome; plaque neovascularization; telangiectasia; hemophiliac joints; angiofibroma; fibromuscular dysplasia; wound granulation; Crohn's disease; and atherosclerosis.

[0676] For example, within one aspect of the present invention methods are provided for treating hypertrophic scars and keloids, comprising the step of administering a polynucleotide, polypeptide, antagonist and/or agonist of the invention to a hypertrophic scar or keloid.

[0677] Within one embodiment of the present invention polynucleotides, polypeptides, antagonists and/or agonists of the invention are directly injected into a hypertrophic scar or keloid, in order to prevent the progression of these lesions. This therapy is of particular value in the prophylactic treatment of conditions which are known to result in the development of hypertrophic scars and keloids (e.g., burns), and is preferably initiated after the proliferative phase has had time to progress (approximately 14 days after the initial injury), but before hypertrophic scar or keloid development. As noted above, the present invention also provides methods for treating neovascular diseases of the eye, including for example, corneal neovascularization, neovascular glaucoma, proliferative diabetic retinopathy, retrolental fibroplasia and macular degeneration.

[0678] Moreover, ocular disorders associated with neovascularization which can be treated with the polynucleotides and polypeptides of the present invention (including agonists and/or antagonists) include, but are not limited to: neovascular glaucoma, diabetic retinopathy, retinoblastoma, retrolental fibroplasia, uveitis, retinopathy of prematurity macular degeneration, corneal graft neovascularization, as well as other eye inflammatory diseases, ocular tumors and diseases associated with choroidal or iris neovascularization. See, e.g., reviews by Waltman et al., Am. J. Ophthal 85:704-710 (1978) and Gartner et al., Surv. Ophthal. 22:291-312 (1978).

[0679] Thus, within one aspect of the present invention methods are provided for treating neovascular diseases of the eye such as corneal neovascularization (including corneal graft neovascularization), comprising the step of administering to a patient a therapeutically effective amount of a compound (as described above) to the cornea, such that the formation of blood vessels is inhibited. Briefly, the cornea is a tissue, which normally lacks blood vessels. In certain pathological conditions however, capillaries may extend into the cornea from the pericorneal vascular plexus of the limbus. When the cornea becomes vascularized, it also becomes clouded, resulting in a decline in the patient's visual acuity. Visual loss may become complete if the cornea completely opacitates. A wide variety of disorders can result in corneal neovascularization, including for example, corneal infections (e.g., trachoma, herpes simplex keratitis, leishmaniasis and onchocerciasis), immunological processes (e.g., graft rejection and Stevens-Johnson's syndrome), alkali burns, trauma, inflammation (of any cause), toxic and nutritional deficiency states, and as a complication of wearing contact lenses.

[0680] Within particularly preferred embodiments of the invention, may be prepared for topical administration in saline (combined with any of the preservatives and antimicrobial agents commonly used in ocular preparations), and administered in eyedrop form. The solution or suspension may be prepared in its pure form and administered several times daily. Alternatively, anti-angiogenic compositions, prepared as described above, may also be administered directly to the cornea. Within preferred embodiments, the anti-angiogenic composition is prepared with a muco-adhesive polymer, which binds to cornea. Within further embodiments, the anti-angiogenic factors or anti-angiogenic compositions may be utilized as an adjunct to conventional steroid therapy. Topical therapy may also be useful prophylactically in corneal lesions which are known to have a high probability of inducing an angiogenic response (such as chemical burns). In these instances the treatment, likely in combination with steroids, may be instituted immediately to help prevent subsequent complications.

[0681] Within other embodiments, the compounds described above may be injected directly into the corneal stroma by an ophthalmologist under microscopic guidance. The preferred site of injection may vary with the morphology of the individual lesion, but the goal of the administration would be to place the composition at the advancing front of the vasculature (i.e., interspersed between the blood vessels and the normal cornea). In most cases this would involve perilimbic corneal injection to “protect” the cornea from the advancing blood vessels. This method may also be utilized shortly after a corneal insult in order to prophylactically prevent corneal neovascularization. In this situation, the material could be injected in the perilimbic cornea interspersed between the corneal lesion and its undesired potential limbic blood supply. Such methods may also be utilized in a similar fashion to prevent capillary invasion of transplanted corneas. In a sustained-release form, injections might only be required 2-3 times per year. A steroid could also be added to the injection solution to reduce inflammation resulting from the injection itself.

[0682] Within another aspect of the present invention, methods are provided for treating neovascular glaucoma, comprising the step of administering to a patient a therapeutically effective amount of a polynucleotide, polypeptide, antagonist and/or agonist to the eye, such that the formation of blood vessels is inhibited. In one embodiment, the compound may be administered topically to the eye in order to treat early forms of neovascular glaucoma. Within other embodiments, the compound may be implanted by injection into the region of the anterior chamber angle. Within other embodiments, the compound may also be placed in any location such that the compound is continuously released into the aqueous humor. Within another aspect of the present invention, methods are provided for treating proliferative diabetic retinopathy, comprising the step of administering to a patient a therapeutically effective amount of a polynucleotide, polypeptide, antagonist and/or agonist to the eyes, such that the formation of blood vessels is inhibited.

[0683] Within particularly preferred embodiments of the invention, proliferative diabetic retinopathy may be treated by injection into the aqueous humor or the vitreous, in order to increase the local concentration of the polynucleotide, polypeptide, antagonist and/or agonist in the retina. Preferably, this treatment should be initiated prior to the acquisition of severe disease requiring photocoagulation.

[0684] Within another aspect of the present invention, methods are provided for treating retrolental fibroplasia, comprising the step of administering to a patient a therapeutically effective amount of a polynucleotide, polypeptide, antagonist and/or agonist to the eye, such that the formation of blood vessels is inhibited. The compound may be administered topically, via intravitreous injection and/or via intraocular implants.

[0685] Additionally, disorders which can be treated with the polynucleotides, polypeptides, agonists and/or agonists include, but are not limited to, hemangioma, arthritis, psoriasis, angiofibroma, atherosclerotic plaques, delayed wound healing, granulations, hemophilic joints, hypertrophic scars, nonunion fractures, Osler-Weber syndrome, pyogenic granuloma, scleroderma, trachoma, and vascular adhesions.

[0686] Moreover, disorders and/or states, which can be treated, prevented, diagnosed and/or prognosed with the polynucleotides, polypeptides, agonists and/or agonists of the invention include, but are not limited to, solid tumors, blood born tumors such as leukemias, tumor metastasis, Kaposi's sarcoma, benign tumors, for example hemangiomas, acoustic neuromas, neurofibromas, trachomas, and pyogenic granulomas, rheumatoid arthritis, psoriasis, ocular angiogenic diseases, for example, diabetic retinopathy, retinopathy of prematurity, macular degeneration, corneal graft rejection, neovascular glaucoma, retrolental fibroplasia, rubeosis, retinoblastoma, and uvietis, delayed wound healing, endometriosis, vascluogenesis, granulations, hypertrophic scars (keloids), nonunion fractures, scleroderma, trachoma, vascular adhesions, myocardial angiogenesis, coronary collaterals, cerebral collaterals, arteriovenous malformations, ischemic limb angiogenesis, Osler-Webber Syndrome, plaque neovascularization, telangiectasia, hemophiliac joints, angiofibroma fibromuscular dysplasia, wound granulation, Crohn's disease, atherosclerosis, birth control agent by preventing vascularization required for embryo implantation controlling menstruation, diseases that have angiogenesis as a pathologic consequence such as cat scratch disease (Rochele minalia quintosa), ulcers (Helicobacter pylori), Bartonellosis and bacillary angiomatosis.

[0687] In one aspect of the birth control method, an amount of the compound sufficient to block embryo implantation is administered before or after intercourse and fertilization have occurred, thus providing an effective method of birth control, possibly a “morning after” method. Polynucleotides, polypeptides, agonists and/or agonists may also be used in controlling menstruation or administered as either a peritoneal lavage fluid or for peritoneal implantation in the treatment of endometriosis.

[0688] Polynucleotides, polypeptides, agonists and/or agonists of the present invention may be incorporated into surgical sutures in order to prevent stitch granulomas.

[0689] Polynucleotides, polypeptides, agonists and/or agonists may be utilized in a wide variety of surgical procedures. For example, within one aspect of the present invention a compositions (in the form of, for example, a spray or film) may be utilized to coat or spray an area prior to removal of a tumor, in order to isolate normal surrounding tissues from malignant tissue, and/or to prevent the spread of disease to surrounding tissues. Within other aspects of the present invention, compositions (e.g., in the form of a spray) may be delivered via endoscopic procedures in order to coat tumors, or inhibit angiogenesis in a desired locale. Within yet other aspects of the present invention, surgical meshes, which have been coated with anti-angiogenic compositions of the present invention may be utilized in any procedure wherein a surgical mesh might be utilized. For example, within one embodiment of the invention a surgical mesh laden with an anti-angiogenic composition may be utilized during abdominal cancer resection surgery (e.g., subsequent to colon resection) in order to provide support to the structure, and to release an amount of the anti-angiogenic

[0690] Within further aspects of the present invention, methods are provided for treating tumor excision sites, comprising administering a polynucleotide, polypeptide, agonist and/or agonist to the resection margins of a tumor subsequent to excision, such that the local recurrence of cancer and the formation of new blood vessels at the site is inhibited. Within one embodiment of the invention, the anti-angiogenic compound is administered directly to the tumor excision site (e.g., applied by swabbing, brushing or otherwise coating the resection margins of the tumor with the anti-angiogenic compound). Alternatively, the anti-angiogenic compounds may be incorporated into known surgical pastes prior to administration. Within particularly preferred embodiments of the invention, the anti-angiogenic compounds are applied after hepatic resections for malignancy, and after neurosurgical operations.

[0691] Within one aspect of the present invention, polynucleotides, polypeptides, agonists and/or agonists may be administered to the resection margin of a wide variety of tumors, including for example, breast, colon, brain and hepatic tumors. For example, within one embodiment of the invention, anti-angiogenic compounds may be administered to the site of a neurological tumor subsequent to excision, such that the formation of new blood vessels at the site are inhibited.

[0692] The polynucleotides, polypeptides, agonists and/or agonists of the present invention may also be administered along with other anti-angiogenic factors. Representative examples of other anti-angiogenic factors include: Anti-Invasive Factor, retinoic acid and derivatives thereof, paclitaxel, Suramin, Tissue Inhibitor of Metalloproteinase-1, Tissue Inhibitor of Metalloproteinase-2, Plasminogen Activator Inhibitor-1, Plasminogen Activator Inhibitor-2, and various forms of the lighter “d group” transition metals.

[0693] Lighter “d group” transition metals include, for example, vanadium, molybdenum, tungsten, titanium, niobium, and tantalum species. Such transition metal species may form transition metal complexes. Suitable complexes of the above-mentioned transition metal species include oxo transition metal complexes.

[0694] Representative examples of vanadium complexes include oxo vanadium complexes such as vanadate and vanadyl complexes. Suitable vanadate complexes include metavanadate and orthovanadate complexes such as, for example, ammonium metavanadate, sodium metavanadate, and sodium orthovanadate. Suitable vanadyl complexes include, for example, vanadyl acetylacetonate and vanadyl sulfate including vanadyl sulfate hydrates such as vanadyl sulfate mono- and trihydrates.

[0695] Representative examples of tungsten and molybdenum complexes also include oxo complexes. Suitable oxo tungsten complexes include tungstate and tungsten oxide complexes. Suitable tungstate complexes include ammonium tungstate, calcium tungstate, sodium tungstate dihydrate, and tungstic acid. Suitable tungsten oxides include tungsten (IV) oxide and tungsten (VI) oxide. Suitable oxo molybdenum complexes include molybdate, molybdenum oxide, and molybdenyl complexes. Suitable molybdate complexes include ammonium molybdate and its hydrates, sodium molybdate and its hydrates, and potassium molybdate and its hydrates. Suitable molybdenum oxides include molybdenum (VI) oxide, molybdenum (VI) oxide, and molybdic acid. Suitable molybdenyl complexes include, for example, molybdenyl acetylacetonate. Other suitable tungsten and molybdenum complexes include hydroxo derivatives derived from, for example, glycerol, tartaric acid, and sugars.

[0696] A wide variety of other anti-angiogenic factors may also be utilized within the context of the present invention. Representative examples include platelet factor 4; protamine sulphate; sulphated chitin derivatives (prepared from queen crab shells), (Murata et al., Cancer Res. 51:22-26 (1991)); Sulphated Polysaccharide Peptidoglycan Complex (SP- PG) (the function of this compound may be enhanced by the presence of steroids such as estrogen, and tamoxifen citrate); Staurosporine; modulators of matrix metabolism, including for example, proline analogs, cishydroxyproline, d,L-3,4-dehydroproline, Thiaproline, alpha,alpha-dipyridyl, aminopropionitrile fumarate; 4-propyl-5-(4-pyridinyl)-2(3H)-oxazolone; Methotrexate; Mitoxantrone; Heparin; Interferons; 2 Macroglobulin-serum; ChIMP-3 (Pavloff et al., J. Bio. Chem. 267:17321-17326 (1992)); Chymostatin (Tomkinson et al., Biochem J. 286:475-480 (1992)); Cyclodextrin Tetradecasulfate; Eponemycin; Camptothecin; Fumagillin (Ingber et al., Nature 348:555-557 (1990)); Gold Sodium Thiomalate (“GST”; Matsubara and Ziff, J. Clin. Invest. 79:1440-1446 (1987)); anticollagenase-serum; alpha2-antiplasmin (Holmes et al., J. Biol. Chem. 262(4):1659-1664 (1987)); Bisantrene (National Cancer Institute); Lobenzarit disodium (N-(2)-carboxyphenyl-4-chloroanthronilic acid disodium or “CCA”; Takeuchi et al., Agents Actions 36:312-316, 1992); Thalidomide; Angostatic steroid; AGM-1470; carboxynaminolmidazole; and metalloproteinase inhibitors such as BB94.

[0697] Musculoskeletal System Disorders

[0698] Polynucleotides, polypeptides, antibodies, and/or agonists or antagonists of the present invention, may be used to treat, prevent, diagnose, and/or prognose disorders of the musculoskeletal system, including but not limited to, disorders of the bone, joints, ligaments, tendons, bursa, muscle, and/or neoplasms and cancers associated with musculoskeletal tissue.

[0699] Diseases or disorders of the bone include, but are not limited to, Albers-Schönberg disease, bowlegs, heel spurs, Köhler's bone disease, knock-knees, Legg-Calvé-Perthes disease, Marfan's syndrome, mucopolysaccharidoses, Osgood-Schlatter disease, osteochondroses, osteochondrodysplasia, osteomyelitis, osteopetroses, osteoporosis (postmenopausal, senile, and juvenile), Paget's disease, Scheuermann's disease, scoliosis, Sever's disease, and patellofemoral stress syndrome.

[0700] Joint diseases or disorders include, but are not limited to, ankylosing spondylitis, Behcet's syndrome, CREST syndrome, Ehlers-Danlos syndrome, infectious arthritis, discoid lupus erythematosus, systemic lupus erythematosus, Lyme disease, osteoarthritis, psoriatic arthritis, relapsing polychondrites, Reiter's syndrome, rheumatoid arthritis (adult and juvenile), scleroderma, and Still's disease.

[0701] Diseases or disorders affecting ligaments, tendons, or bursa include, but are not limited to, ankle sprain, bursitis, posterior Achilles tendon bursitis (Haglund's deformity), anterior Achilles tendon bursitis (Albert's disease), tendinitis, tenosynovitis, poplieus tendinitis, Achilles tendinitis, medial or lateral epicondylitis, rotator cuff tendinitis, spasmodic torticollis; and fibromyalgia syndrome.

[0702] Muscle diseases or disorders include, but are not limited to, Becker's muscular dystrophy, Duchenne's muscular dystrophy, Landouzy-Dejerine muscular dystrophy, Leyden-Móbius muscular dystrophy, Erb's muscular dystrophy, Charcot's joints, dermatomyositis, gout, pseudogout, glycogen storage diseases, Pompe's disease, mitochondrial myopathy, periodic paralysis, polymyalgia rheumatica, polymyositis, Steinert's disease, Thomsen's disease, anterolateral and posteromedial shin splints, posterior femoral muscle strain, and fibromyositis.

[0703] Musculoskeletal tissue may also develop cancers and/or neoplasms that include, but are not limited to, osteochondroma, benign chondroma, chondroblastoma, chondromyxoid fibroma, osteoid osteoma, giant cell tumor, multiple myeloma, osteosarcoma, fibrosarcoma, malignant fibrous histiocytoma, chondrosarcoma, Ewing's tumor, and malignant lymphoma of bone.

[0704] Neural Activity and Neurological Diseases

[0705] The polynucleotides, polypeptides and agonists or antagonists of the invention may be used for the diagnosis and/or treatment of diseases, disorders, damage or injury of the brain and/or nervous system. Nervous system disorders that can be treated with the compositions of the invention (e.g., polypeptides, polynucleotides, and/or agonists or antagonists), include, but are not limited to, nervous system injuries, and diseases or disorders which result in either a disconnection of axons, a diminution or degeneration of neurons, or demyelination. Nervous system lesions which may be treated in a patient (including human and non-human mammalian patients) according to the methods of the invention, include but are not limited to, the following lesions of either the central (including spinal cord, brain) or peripheral nervous systems: (1) ischemic lesions, in which a lack of oxygen in a portion of the nervous system results in neuronal injury or death, including cerebral infarction or ischemia, or spinal cord infarction or ischemia; (2) traumatic lesions, including lesions caused by physical injury or associated with surgery, for example, lesions which sever a portion of the nervous system, or compression injuries; (3) malignant lesions, in which a portion of the nervous system is destroyed or injured by malignant tissue which is either a nervous system associated malignancy or a malignancy derived from non-nervous system tissue; (4) infectious lesions, in which a portion of the nervous system is destroyed or injured as a result of infection, for example, by an abscess or associated with infection by human immunodeficiency virus, herpes zoster, or herpes simplex virus or with Lyme disease, tuberculosis, or syphilis; (5) degenerative lesions, in which a portion of the nervous system is destroyed or injured as a result of a degenerative process including but not limited to, degeneration associated with Parkinson's disease, Alzheimer's disease, Huntington's chorea, or amyotrophic lateral sclerosis (ALS); (6) lesions associated with nutritional diseases or disorders, in which a portion of the nervous system is destroyed or injured by a nutritional disorder or disorder of metabolism including, but not limited to, vitamin B12 deficiency, folic acid deficiency, Wemicke disease, tobacco-alcohol amblyopia, Marchiafava-Bignami disease (primary degeneration of the corpus callosum), and alcoholic cerebellar degeneration; (7) neurological lesions associated with systemic diseases including, but not limited to, diabetes (diabetic neuropathy, Bell's palsy), systemic lupus erythematosus, carcinoma, or sarcoidosis; (8) lesions caused by toxic substances including alcohol, lead, or particular neurotoxins; and (9) demyelinated lesions in which a portion of the nervous system is destroyed or injured by a demyelinating disease including, but not limited to, multiple sclerosis, human immunodeficiency virus-associated myelopathy, transverse myelopathy or various etiologies, progressive multifocal leukoencephalopathy, and central pontine myelinolysis.

[0706] In one embodiment, the polypeptides, polynucleotides, or agonists or antagonists of the invention are used to protect neural cells from the damaging effects of hypoxia. In a further preferred embodiment, the polypeptides, polynucleotides, or agonists or antagonists of the invention are used to protect neural cells from the damaging effects of cerebral hypoxia. According to this embodiment, the compositions of the invention are used to treat or prevent neural cell injury associated with cerebral hypoxia. In one non-exclusive aspect of this embodiment, the polypeptides, polynucleotides, or agonists or antagonists of the invention, are used to treat or prevent neural cell injury associated with cerebral ischemia. In another non-exculsive aspect of this embodiment, the polypeptides, polynucleotides, or agonists or antagonists of the invention are used to treat or prevent neural cell injury associated with cerebral infarction.

[0707] In another preferred embodiment, the polypeptides, polynucleotides, or agonists or antagonists of the invention are used to treat or prevent neural cell injury associated with a stroke. In a specific embodiment, the polypeptides, polynucleotides, or agonists or antagonists of the invention are used to treat or prevent cerebral neural cell injury associated with a stroke.

[0708] In another preferred embodiment, the polypeptides, polynucleotides, or agonists or antagonists of the invention are used to treat or prevent neural cell injury associated with a heart attack. In a specific embodiment, the polypeptides, polynucleotides, or agonists or antagonists of the invention are used to treat or prevent cerebral neural cell injury associated with a heart attack.

[0709] The compositions of the invention which are useful for treating or preventing a nervous system disorder may be selected by testing for biological activity in promoting the survival or differentiation of neurons. For example, and not by way of limitation, compositions of the invention which elicit any of the following effects may be useful according to the invention: (1) increased survival time of neurons in culture either in the presence or absence of hypoxia or hypoxic conditions; (2) increased sprouting of neurons in culture or in vivo; (3) increased production of a neuron-associated molecule in culture or in vivo, e.g., choline acetyltransferase or acetylcholinesterase with respect to motor neurons; or (4) decreased symptoms of neuron dysfunction in vivo. Such effects may be measured by any method known in the art. In preferred, non-limiting embodiments, increased survival of neurons may routinely be measured using a method set forth herein or otherwise known in the art, such as, for example, in Zhang et al., Proc Natl Acad Sci USA 97:3637-42 (2000) or in Arakawa et al., J. Neurosci., 10:3507-15 (1990); increased sprouting of neurons may be detected by methods known in the art, such as, for example, the methods set forth in Pestronk et al., Exp. Neurol., 70:65-82 (1980), or Brown et al., Ann. Rev. Neurosci., 4:17-42 (1981); increased production of neuron-associated molecules may be measured by bioassay, enzymatic assay, antibody binding, Northern blot assay, etc., using techniques known in the art and depending on the molecule to be measured; and motor neuron dysfunction may be measured by assessing the physical manifestation of motor neuron disorder, e.g., weakness, motor neuron conduction velocity, or functional disability.

[0710] In specific embodiments, motor neuron disorders that may be treated according to the invention include, but are not limited to, disorders such as infarction, infection, exposure to toxin, trauma, surgical damage, degenerative disease or malignancy that may affect motor neurons as well as other components of the nervous system, as well as disorders that selectively affect neurons such as amyotrophic lateral sclerosis, and including, but not limited to, progressive spinal muscular atrophy, progressive bulbar palsy, primary lateral sclerosis, infantile and juvenile muscular atrophy, progressive bulbar paralysis of childhood (Fazio-Londe syndrome), poliomyelitis and the post polio syndrome, and Hereditary Motorsensory Neuropathy (Charcot-Marie-Tooth Disease).

[0711] Further, polypeptides or polynucleotides of the invention may play a role in neuronal survival; synapse formation; conductance; neural differentiation, etc. Thus, compositions of the invention (including polynucleotides, polypeptides, and agonists or antagonists) may be used to diagnose and/or treat or prevent diseases or disorders associated with these roles, including, but not limited to, learning and/or cognition disorders. The compositions of the invention may also be useful in the treatment or prevention of neurodegenerative disease states and/or behavioural disorders. Such neurodegenerative disease states and/or behavioral disorders include, but are not limited to, Alzheimer's Disease, Parkinson's Disease, Huntington's Disease, Tourette Syndrome, schizophrenia, mania, dementia, paranoia, obsessive compulsive disorder, panic disorder, learning disabilities, ALS, psychoses, autism, and altered behaviors, including disorders in feeding, sleep patterns, balance, and perception. In addition, compositions of the invention may also play a role in the treatment, prevention and/or detection of developmental disorders associated with the developing embryo, or sexually-linked disorders.

[0712] Additionally, polypeptides, polynucleotides and/or agonists or antagonists of the invention, may be useful in protecting neural cells from diseases, damage, disorders, or injury, associated with cerebrovascular disorders including, but not limited to, carotid artery diseases (e.g., carotid artery thrombosis, carotid stenosis, or Moyamoya Disease), cerebral amyloid angiopathy, cerebral aneurysm, cerebral anoxia, cerebral arteriosclerosis, cerebral arteriovenous malformations, cerebral artery diseases, cerebral embolism and thrombosis (e.g., carotid artery thrombosis, sinus thrombosis, or Wallenberg's Syndrome), cerebral hemorrhage (e.g., epidural or subdural hematoma, or subarachnoid hemorrhage), cerebral infarction, cerebral ischemia (e.g., transient cerebral ischemia, Subclavian Steal Syndrome, or vertebrobasilar insufficiency), vascular dementia (e.g., multi-infarct), leukomalacia, periventricular, and vascular headache (e.g., cluster headache or migraines).

[0713] In accordance with yet a further aspect of the present invention, there is provided a process for utilizing polynucleotides or polypeptides, as well as agonists or antagonists of the present invention, for therapeutic purposes, for example, to stimulate neurological cell proliferation and/or differentiation. Therefore, polynucleotides, polypeptides, agonists and/or antagonists of the invention may be used to treat and/or detect neurologic diseases. Moreover, polynucleotides or polypeptides, or agonists or antagonists of the invention, can be used as a marker or detector of a particular nervous system disease or disorder.

[0714] Examples of neurologic diseases which can be treated or detected with polynucleotides, polypeptides, agonists, and/or antagonists of the present invention include brain diseases, such as metabolic brain diseases which includes phenylketonuria such as maternal phenylketonuria, pyruvate carboxylase deficiency, pyruvate dehydrogenase complex deficiency, Wernicke's Encephalopathy, brain edema, brain neoplasms such as cerebellar neoplasms which include infratentorial neoplasms, cerebral ventricle neoplasms such as choroid plexus neoplasms, hypothalamic neoplasms, supratentorial neoplasms, canavan disease, cerebellar diseases such as cerebellar ataxia which include spinocerebellar degeneration such as ataxia telangiectasia, cerebellar dyssynergia, Friederich's Ataxia, Machado-Joseph Disease, olivopontocerebellar atrophy, cerebellar neoplasms such as infratentorial neoplasms, diffuse cerebral sclerosis such as encephalitis periaxialis, globoid cell leukodystrophy, metachromatic leukodystrophy and subacute sclerosing panencephalitis.

[0715] Additional neurologic diseases which can be treated or detected with polynucleotides, polypeptides, agonists, and/or antagonists of the present invention include cerebrovascular disorders (such as carotid artery diseases which include carotid artery thrombosis, carotid stenosis and Moyamoya Disease), cerebral amyloid angiopathy, cerebral aneurysm, cerebral anoxia, cerebral arteriosclerosis, cerebral arteriovenous malformations, cerebral artery diseases, cerebral embolism and thrombosis such as carotid artery thrombosis, sinus thrombosis and Wallenberg's Syndrome, cerebral hemorrhage such as epidural hematoma, subdural hematoma and subarachnoid hemorrhage, cerebral infarction, cerebral ischemia such as transient cerebral ischemia, Subclavian Steal Syndrome and vertebrobasilar insufficiency, vascular dementia such as multi-infarct dementia, periventricular leukomalacia, vascular headache such as cluster headache and migraine.

[0716] Additional neurologic diseases which can be treated or detected with polynucleotides, polypeptides, agonists, and/or antagonists of the present invention include dementia such as AIDS Dementia Complex, presenile dementia such as Alzheimer's Disease and Creutzfeldt-Jakob Syndrome, senile dementia such as Alzheimer's Disease and progressive supranuclear palsy, vascular dementia such as multi-infarct dementia, encephalitis which include encephalitis periaxialis, viral encephalitis such as epidemic encephalitis, Japanese Encephalitis, St. Louis Encephalitis, tick-borne encephalitis and West Nile Fever, acute disseminated encephalomyelitis, meningoencephalitis such as uveomeningoencephalitic syndrome, Postencephalitic Parkinson Disease and subacute sclerosing panencephalitis, encephalomalacia such as periventricular leukomalacia, epilepsy such as generalized epilepsy which includes infantile spasms, absence epilepsy, myoclonic epilepsy which includes MERRF Syndrome, tonic-clonic epilepsy, partial epilepsy such as complex partial epilepsy, frontal lobe epilepsy and temporal lobe epilepsy, post-traumatic epilepsy, status epilepticus such as Epilepsia Partialis Continua, and Hallervorden-Spatz Syndrome.

[0717] Additional neurologic diseases which can be treated or detected with polynucleotides, polypeptides, agonists, and/or antagonists of the present invention include hydrocephalus such as Dandy-Walker Syndrome and normal pressure hydrocephalus, hypothalamic diseases such as hypothalamic neoplasms, cerebral malaria, narcolepsy which includes cataplexy, bulbar poliomyelitis, cerebri pseudotumor, Rett Syndrome, Reye's Syndrome, thalamic diseases, cerebral toxoplasmosis, intracranial tuberculoma and Zellweger Syndrome, central nervous system infections such as AIDS Dementia Complex, Brain Abscess, subdural empyema, encephalomyelitis such as Equine Encephalomyelitis, Venezuelan Equine Encephalomyelitis, Necrotizing Hemorrhagic Encephalomyelitis, Visna, and cerebral malaria.

[0718] Additional neurologic diseases which can be treated or detected with polynucleotides, polypeptides, agonists, and/or antagonists of the present invention include meningitis such as arachnoiditis, aseptic meningtitis such as viral meningtitis which includes lymphocytic choriomeningitis, Bacterial meningtitis which includes Haemophilus Meningtitis, Listeria Meningtitis, Meningococcal Meningtitis such as Waterhouse-Friderichsen Syndrome, Pneumococcal Meningtitis and meningeal tuberculosis, fungal meningitis such as Cryptococcal Meningtitis, subdural effusion, meningoencephalitis such as uvemeningoencephalitic syndrome, myelitis such as transverse myelitis, neurosyphilis such as tabes dorsalis, poliomyelitis which includes bulbar poliomyelitis and postpoliomyelitis syndrome, prion diseases (such as Creutzfeldt-Jakob Syndrome, Bovine Spongiform Encephalopathy, Gerstmann-Straussler Syndrome, Kuru, Scrapie), and cerebral toxoplasmosis.

[0719] Additional neurologic diseases which can be treated or detected with polynucleotides, polypeptides, agonists, and/or antagonists of the present invention include central nervous system neoplasms such as brain neoplasms that include cerebellar neoplasms such as infratentorial neoplasms, cerebral ventricle neoplasms such as choroid plexus neoplasms, hypothalamic neoplasms and supratentorial neoplasms, meningeal neoplasms, spinal cord neoplasms which include epidural neoplasms, demyelinating diseases such as Canavan Diseases, diffuse cerebral sceloris which includes adrenoleukodystrophy, encephalitis periaxialis, globoid cell leukodystrophy, diffuse cerebral sclerosis such as metachromatic leukodystrophy, allergic encephalomyelitis, necrotizing hemorrhagic encephalomyelitis, progressive multifocal leukoencephalopathy, multiple sclerosis, central pontine myelinolysis, transverse myelitis, neuromyelitis optica, Scrapie, Swayback, Chronic Fatigue Syndrome, Visna, High Pressure Nervous Syndrome, Meningism, spinal cord diseases such as amyotonia congenita, amyotrophic lateral sclerosis, spinal muscular atrophy such as Werdnig-Hoffmann Disease, spinal cord compression, spinal cord neoplasms such as epidural neoplasms, syringomyelia, Tabes Dorsalis, Stiff-Man Syndrome, mental retardation such as Angelman Syndrome, Cri-du-Chat Syndrome, De Lange's Syndrome, Down Syndrome, Gangliosidoses such as gangliosidoses G(M1), Sandhoff Disease, Tay-Sachs Disease, Hartnup Disease, homocystinuria, Laurence-Moon- Biedl Syndrome, Lesch-Nyhan Syndrome, Maple Syrup Urine Disease, mucolipidosis such as fucosidosis, neuronal ceroid-lipofuscinosis, oculocerebrorenal syndrome, phenylketonuria such as maternal phenylketonuria, Prader-Willi Syndrome, Rett Syndrome, Rubinstein-Taybi Syndrome, Tuberous Sclerosis, WAGR Syndrome, nervous system abnormalities such as holoprosencephaly, neural tube defects such as anencephaly which includes hydrangencephaly, Arnold-Chairi Deformity, encephalocele, meningocele, meningomyelocele, spinal dysraphism such as spina bifida cystica and spina bifida occulta.

[0720] Additional neurologic diseases which can be treated or detected with polynucleotides, polypeptides, agonists, and/or antagonists of the present invention include hereditary motor and sensory neuropathies which include Charcot-Marie Disease, Hereditary optic atrophy, Refsum's Disease, hereditary spastic paraplegia, Werdnig-Hoffmann Disease, Hereditary Sensory and Autonomic Neuropathies such as Congenital Analgesia and Familial Dysautonomia, Neurologic manifestations (such as agnosia that include Gerstmann's Syndrome, Amnesia such as retrograde amnesia, apraxia, neurogenic bladder, cataplexy, communicative disorders such as hearing disorders that includes deafness, partial hearing loss, loudness recruitment and tinnitus, language disorders such as aphasia which include agraphia, anomia, broca aphasia, and Wernicke Aphasia, Dyslexia such as Acquired Dyslexia, language development disorders, speech disorders such as aphasia which includes anomia, broca aphasia and Wernicke Aphasia, articulation disorders, communicative disorders such as speech disorders which include dysarthria, echolalia, mutism and stuttering, voice disorders such as aphonia and hoarseness, decerebrate state, delirium, fasciculation, hallucinations, meningism, movement disorders such as angelman syndrome, ataxia, athetosis, chorea, dystonia, hypokinesia, muscle hypotonia, myoclonus, tic, torticollis and tremor, muscle hypertonia such as muscle rigidity such as stiff-man syndrome, muscle spasticity, paralysis such as facial paralysis which includes Herpes Zoster Oticus, Gastroparesis, Hemiplegia, ophthalmoplegia such as diplopia, Duane's Syndrome, Horner's Syndrome, Chronic progressive external ophthalmoplegia such as Kearns Syndrome, Bulbar Paralysis, Tropical Spastic Paraparesis, Paraplegia such as Brown-Sequard Syndrome, quadriplegia, respiratory paralysis and vocal cord paralysis, paresis, phantom limb, taste disorders such as ageusia and dysgeusia, vision disorders such as amblyopia, blindness, color vision defects, diplopia, hemianopsia, scotoma and subnormal vision, sleep disorders such as hypersomnia which includes Kleine-Levin Syndrome, insomnia, and somnambulism, spasm such as trismus, unconsciousness such as coma, persistent vegetative state and syncope and vertigo, neuromuscular diseases such as amyotonia congenita, amyotrophic lateral sclerosis, Lambert-Eaton Myasthenic Syndrome, motor neuron disease, muscular atrophy such as spinal muscular atrophy, Charcot-Marie Disease and Werdnig-Hoffmann Disease, Postpoliomyelitis Syndrome, Muscular Dystrophy, Myasthenia Gravis, Myotonia Atrophica, Myotonia Confenita, Nemaline Myopathy, Familial Periodic Paralysis, Multiplex Paramyloclonus, Tropical Spastic Paraparesis and Stiff-Man Syndrome, peripheral nervous system diseases such as acrodynia, amyloid neuropathies, autonomic nervous system diseases such as Adie's Syndrome, Barre-Lieou Syndrome, Familial Dysautonomia, Horner's Syndrome, Reflex Sympathetic Dystrophy and Shy-Drager Syndrome, Cranial Nerve Diseases such as Acoustic Nerve Diseases such as Acoustic Neuroma which includes Neurofibromatosis 2, Facial Nerve Diseases such as Facial Neuralgia, Melkersson-Rosenthal Syndrome, ocular motility disorders which includes amblyopia, nystagmus, oculomotor nerve paralysis, ophthalmoplegia such as Duane's Syndrome, Horner's Syndrome, Chronic Progressive External Ophthalmoplegia which includes Kearns Syndrome, Strabismus such as Esotropia and Exotropia, Oculomotor Nerve Paralysis, Optic Nerve Diseases such as Optic Atrophy which includes Hereditary Optic Atrophy, Optic Disk Drusen, Optic Neuritis such as Neuromyelitis Optica, Papilledema, Trigeminal Neuralgia, Vocal Cord Paralysis, Demyelinating Diseases such as Neuromyelitis Optica and Swayback, and Diabetic neuropathies such as diabetic foot.

[0721] Additional neurologic diseases which can be treated or detected with polynucleotides, polypeptides, agonists, and/or antagonists of the present invention include nerve compression syndromes such as carpal tunnel syndrome, tarsal tunnel syndrome, thoracic outlet syndrome such as cervical rib syndrome, ulnar nerve compression syndrome, neuralgia such as causalgia, cervico-brachial neuralgia, facial neuralgia and trigeminal neuralgia, neuritis such as experimental allergic neuritis, optic neuritis, polyneuritis, polyradiculoneuritis and radiculities such as polyradiculitis, hereditary motor and sensory neuropathies such as Charcot-Marie Disease, Hereditary Optic Atrophy, Refsum's Disease, Hereditary Spastic Paraplegia and Werdnig-Hoffmann Disease, Hereditary Sensory and Autonomic Neuropathies which include Congenital Analgesia and Familial Dysautonomia, POEMS Syndrome, Sciatica, Gustatory Sweating and Tetany).

[0722] Endocrine Disorders

[0723] Polynucleotides or polypeptides, or agonists or antagonists of the present invention, may be used to treat, prevent, diagnose, and/or prognose disorders and/or diseases related to hormone imbalance, and/or disorders or diseases of the endocrine system.

[0724] Hormones secreted by the glands of the endocrine system control physical growth, sexual function, metabolism, and other functions. Disorders may be classified in two ways: disturbances in the production of hormones, and the inability of tissues to respond to hormones. The etiology of these hormone imbalance or endocrine system diseases, disorders or conditions may be genetic, somatic, such as cancer and some autoimmune diseases, acquired (e.g., by chemotherapy, injury or toxins), or infectious. Moreover, polynucleotides, polypeptides, antibodies, and/or agonists or antagonists of the present invention can be used as a marker or detector of a particular disease or disorder related to the endocrine system and/or hormone imbalance.

[0725] Endocrine system and/or hormone imbalance and/or diseases encompass disorders of uterine motility including, but not limited to: complications with pregnancy and labor (e.g., pre-term labor, post-term pregnancy, spontaneous abortion, and slow or stopped labor); and disorders and/or diseases of the menstrual cycle (e.g., dysmenorrhea and endometriosis).

[0726] Endocrine system and/or hormone imbalance disorders and/or diseases include disorders and/or diseases of the pancreas, such as, for example, diabetes mellitus, diabetes insipidus, congenital pancreatic agenesis, pheochromocytoma—islet cell tumor syndrome; disorders and/or diseases of the adrenal glands such as, for example, Addison's Disease, corticosteroid deficiency, virilizing disease, hirsutism, Cushing's Syndrome, hyperaldosteronism, pheochromocytoma; disorders and/or diseases of the pituitary gland, such as, for example, hyperpituitarism, hypopituitarism, pituitary dwarfism, pituitary adenoma, panhypopituitarism, acromegaly, gigantism; disorders and/or diseases of the thyroid, including but not limited to, hyperthyroidism, hypothyroidism, Plummer's disease, Graves' disease (toxic diffuse goiter), toxic nodular goiter, thyroiditis (Hashimoto's thyroiditis, subacute granulomatous thyroiditis, and silent lymphocytic thyroiditis), Pendred's syndrome, myxedema, cretinism, thyrotoxicosis, thyroid hormone coupling defect, thymic aplasia, Hurthle cell tumours of the thyroid, thyroid cancer, thyroid carcinoma, Medullary thyroid carcinoma; disorders and/or diseases of the parathyroid, such as, for example, hyperparathyroidism, hypoparathyroidism; disorders and/or diseases of the hypothalamus.

[0727] In addition, endocrine system and/or hormone imbalance disorders and/or diseases may also include disorders and/or diseases of the testes or ovaries, including cancer. Other disorders and/or diseases of the testes or ovaries further include, for example, ovarian cancer, polycystic ovary syndrome, Klinefelter's syndrome, vanishing testes syndrome (bilateral anorchia), congenital absence of Leydig's cells, cryptorchidism, Noonan's syndrome, myotonic dystrophy, capillary haemangioma of the testis (benign), neoplasias of the testis and neo-testis.

[0728] Moreover, endocrine system and/or hormone imbalance disorders and/or diseases may also include disorders and/or diseases such as, for example, polyglandular deficiency syndromes, pheochromocytoma, neuroblastoma, multiple Endocrine neoplasia, and disorders and/or cancers of endocrine tissues.

[0729] In another embodiment, a polypeptide of the invention, or polynucleotides, antibodies, agonists, or antagonists corresponding to that polypeptide, may be used to diagnose, prognose, prevent, and/or treat endocrine diseases and/or disorders associated with the tissue(s) in which the polypeptide of the invention is expressed, including one, two, three, four, five, or more tissues disclosed in Table 1A, column 7 (Tissue Distribution Library Code).

[0730] Reproductive System Disorders

[0731] The polynucleotides or polypeptides, or agonists or antagonists of the invention may be used for the diagnosis, treatment, or prevention of diseases and/or disorders of the reproductive system. Reproductive system disorders that can be treated by the compositions of the invention, include, but are not limited to, reproductive system injuries, infections, neoplastic disorders, congenital defects, and diseases or disorders which result in infertility, complications with pregnancy, labor, or parturition, and postpartum difficulties.

[0732] Reproductive system disorders and/or diseases include diseases and/or disorders of the testes, including, but not limited to, testicular atrophy, testicular feminization, cryptorchism (unilateral and bilateral), anorchia, ectopic testis, epididymitis and orchitis (typically resulting from infections such as, for example, gonorrhea, mumps, tuberculosis, and syphilis), testicular torsion, vasitis nodosa, germ cell tumors (e.g., seminomas, embryonal cell carcinomas, teratocarcinomas, choriocarcinomas, yolk sac tumors, and teratomas), stromal tumors (e.g., Leydig cell tumors), hydrocele, hematocele, varicocele, spermatocele, inguinal hernia, and disorders of sperm production (e.g., immotile cilia syndrome, aspermia, asthenozoospermia, azoospermia, oligospermia, and teratozoospermia).

[0733] Reproductive system disorders also include, but are not limited to, disorders of the prostate gland, such as acute non-bacterial prostatitis, chronic non-bacterial prostatitis, acute bacterial prostatitis, chronic bacterial prostatitis, prostatodystonia, prostatosis, granulomatous prostatitis, malacoplakia, benign prostatic hypertrophy or hyperplasia, and prostate neoplastic disorders, including adenocarcinomas, transitional cell carcinomas, ductal carcinomas, and squamous cell carcinomas.

[0734] Additionally, the compositions of the invention may be useful in the diagnosis, treatment, and/or prevention of disorders or diseases of the penis and urethra, including, but not limited to, inflammatory disorders, such as balanoposthitis, balanitis xerotica obliterans, phimosis, paraphimosis, syphilis, herpes simplex virus, gonorrhea, non-gonococcal urethritis, chlamydia, mycoplasma, trichomonas, HIV, AIDS, Reiter's syndrome, condyloma acuminatum, condyloma latum, and pearly penile papules; urethral abnormalities, such as hypospadias, epispadias, and phimosis; premalignant lesions, including Erythroplasia of Queyrat, Bowen's disease, Bowenoid paplosis, giant condyloma of Buscke-Lowenstein, and varrucous carcinoma; penile cancers, including squamous cell carcinomas, carcinoma in situ, verrucous carcinoma, and disseminated penile carcinoma; urethral neoplastic disorders, including penile urethral carcinoma, bulbomembranous urethral carcinoma, and prostatic urethral carcinoma; and erectile disorders, such as priapism, Peyronie's disease, erectile dysfunction, and impotence.

[0735] Moreover, diseases and/or disorders of the vas deferens include, but are not limited to, vasculititis and CBAVD (congenital bilateral absence of the vas deferens); additionally, the polynucleotides, polypeptides, and agonists or antagonists of the present invention may be used in the diagnosis, treatment, and/or prevention of diseases and/or disorders of the seminal vesicles, including but not limited to, hydatid disease, congenital chloride diarrhea, and polycystic kidney disease.

[0736] Other disorders and/or diseases of the male reproductive system that may be diagnosed, treated, and/or prevented with the compositions of the invention include, but are not limited to, Klinefelter's syndrome, Young's syndrome, premature ejaculation, diabetes mellitus, cystic fibrosis, Kartagener's syndrome, high fever, multiple sclerosis, and gynecomastia.

[0737] Further, the polynucleotides, polypeptides, and agonists or antagonists of the present invention may be used in the diagnosis, treatment, and/or prevention of diseases and/or disorders of the vagina and vulva, including, but not limited to, bacterial vaginosis, candida vaginitis, herpes simplex virus, chancroid, granuloma inguinale, lymphogranuloma venereum, scabies, human papillomavirus, vaginal trauma, vulvar trauma, adenosis, chlamydia vaginitis, gonorrhea, trichomonas vaginitis, condyloma acuminatum, syphilis, molluscum contagiosum, atrophic vaginitis, Paget's disease, lichen sclerosus, lichen planus, vulvodynia, toxic shock syndrome, vaginismus, vulvovaginitis, vulvar vestibulitis, and neoplastic disorders, such as squamous cell hyperplasia, clear cell carcinoma, basal cell carcinoma, melanomas, cancer of Bartholin's gland, and vulvar intraepithelial neoplasia.

[0738] Disorders and/or diseases of the uterus that may be diagnosed, treated, and/or prevented with the compositions of the invention include, but are not limited to, dysmenorrhea, retroverted uterus, endometriosis, fibroids, adenomyosis, anovulatory bleeding, amenorrhea, Cushing's syndrome, hydatidiform moles, Asherman's syndrome, premature menopause, precocious puberty, uterine polyps, dysfunctional uterine bleeding (e.g., due to aberrant hormonal signals), and neoplastic disorders, such as adenocarcinomas, keiomyosarcomas, and sarcomas. Additionally, the polypeptides, polynucleotides, or agonists or antagonists of the invention may be useful as a marker or detector of, as well as in the diagnosis, treatment, and/or prevention of congenital uterine abnormalities, such as bicornuate uterus, septate uterus, simple unicornuate uterus, unicornuate uterus with a noncavitary rudimentary horn, unicornuate uterus with a non-communicating cavitary rudimentary horn, unicornuate uterus with a communicating cavitary horn, arcuate uterus, uterine didelfus, and T-shaped uterus.

[0739] Ovarian diseases and/or disorders that may be diagnosed, treated, and/or prevented with the compositions of the invention include, but are not limited to, anovulation, polycystic ovary syndrome (Stein-Leventhal syndrome), ovarian cysts, ovarian hypofunction, ovarian insensitivity to gonadotropins, ovarian overproduction of androgens, right ovarian vein syndrome, amenorrhea, hirutism, and ovarian cancer (including, but not limited to, primary and secondary cancerous growth, Sertoli-Leydig tumors, endometriod carcinoma of the ovary, ovarian papillary serous adenocarcinoma, ovarian mucinous adenocarcinoma, and Ovarian Krukenberg tumors).

[0740] Cervical diseases and/or disorders that may be diagnosed, treated, and/or prevented with the compositions of the invention include, but are not limited to, cervicitis, chronic cervicitis, mucopurulent cervicitis, cervical dysplasia, cervical polyps, Nabothian cysts, cervical erosion, cervical incompetence, and cervical neoplasms (including, for example, cervical carcinoma, squamous metaplasia, squamous cell carcinoma, adenosquamous cell neoplasia, and columnar cell neoplasia).

[0741] Additionally, diseases and/or disorders of the reproductive system that may be diagnosed, treated, and/or prevented with the compositions of the invention include, but are not limited to, disorders and/or diseases of pregnancy, including miscarriage and stillbirth, such as early abortion, late abortion, spontaneous abortion, induced abortion, therapeutic abortion, threatened abortion, missed abortion, incomplete abortion, complete abortion, habitual abortion, missed abortion, and septic abortion; ectopic pregnancy, anemia, Rh incompatibility, vaginal bleeding during pregnancy, gestational diabetes, intrauterine growth retardation, polyhydramnios, HELLP syndrome, abruptio placentae, placenta previa, hyperemesis, preeclampsia, eclampsia, herpes gestationis, and urticaria of pregnancy. Additionally, the polynucleotides, polypeptides, and agonists or antagonists of the present invention may be used in the diagnosis, treatment, and/or prevention of diseases that can complicate pregnancy, including heart disease, heart failure, rheumatic heart disease, congenital heart disease, mitral valve prolapse, high blood pressure, anemia, kidney disease, infectious disease (e.g., rubella, cytomegalovirus, toxoplasmosis, infectious hepatitis, chlamydia, HIV, AIDS, and genital herpes), diabetes mellitus, Graves' disease, thyroiditis, hypothyroidism, Hashimoto's thyroiditis, chronic active hepatitis, cirrhosis of the liver, primary biliary cirrhosis, asthma, systemic lupus eryematosis, rheumatoid arthritis, myasthenia gravis, idiopathic thrombocytopenic purpura, appendicitis, ovarian cysts, gallbladder disorders,and obstruction of the intestine.

[0742] Complications associated with labor and parturition that may be diagnosed, treated, and/or prevented with the compositions of the invention include, but are not limited to, premature rupture of the membranes, pre-term labor, post-term pregnancy, postmaturity, labor that progresses too slowly, fetal distress (e.g., abnormal heart rate (fetal or maternal), breathing problems, and abnormal fetal position), shoulder dystocia, prolapsed umbilical cord, amniotic fluid embolism, and aberrant uterine bleeding.

[0743] Further, diseases and/or disorders of the postdelivery period, that may be diagnosed, treated, and/or prevented with the compositions of the invention, include, but are not limited to, endometritis, myometritis, parametritis, peritonitis, pelvic thrombophlebitis, pulmonary embolism, endotoxemia, pyelonephritis, saphenous thrombophlebitis, mastitis, cystitis, postpartum hemorrhage, and inverted uterus.

[0744] Other disorders and/or diseases of the female reproductive system that may be diagnosed, treated, and/or prevented by the polynucleotides, polypeptides, and agonists or antagonists of the present invention include, but are not limited to, Turner's syndrome, pseudohermaphroditism, premenstrual syndrome, pelvic inflammatory disease, pelvic congestion (vascular engorgement), frigidity, anorgasmia, dyspareunia, ruptured fallopian tube, and Mittelschmerz.

[0745] Developmental and Inherited Disorders

[0746] Polynuceotides or polypeptides, or agonists or antagonists of the present invention may be used to treat, prevent, diagnose, and/or prognose diseases associated with mixed fetal tissues, including, but not limited to, developmental and inherited disorders or defects of the nervous system, musculoskelelal system, execretory system, cardiovascular system, hematopoietic system, gastrointestinal system, reproductive system, and respiratory system. Compositions of the present invention may also be used to treat, prevent, diagnose, and/or prognose developmental and inherited disorders or defects associated with, but not limited to, skin, hair, visual, and auditory tissues, metabolism. Additionally, the compositions of the invention may be useful in Ithe diagnosis, treatment, and/or prevention of disorders or diseases associated with, but not limited to, chromosomal or genetic abnormalities and hyperproliferation or neoplasia.

[0747] Disorders or defects of the nervous system associated with developmental or inherited abnormalities that may be diagnosed, treated, and/or prevented with the compostions of the invention include, but are not limited to, adrenoleukodystrophy, agenesis of corpus callosum, Alexander disease, anencephaly, Angelman syndrome, Arnold-Chiari deformity, Batten disease, Canavan disease, cephalic disorders, Charcot-Marie-Tooth disease, encephalocele, Friedreich's ataxia, Gaucher's disease, Gorlin syndrome, Hallervorden-Spatz disease, hereditary spastic paraplegia, Huntington disease, hydranencephaly, hydrocephalus, Joubert syndrome, Llesch-Nuhan syndrome, leukodystrophy, Menkes disease, microcephaly, Niemann-Pick Type C1, neurofibromatosis, porencephaly, progeria, proteus syndrome, Refsum disease, spina bifida, Sturge-Weber syndrome, Tay-Sachs disease, tuberous sclerosis, and von Hippel-Lindau disease.

[0748] Developmental and inherited disorders resulting in disorders or defects of the musculoskeletal system that may be diagnosed, treated, and/or prevented with the compositions of the invention include, but are not limited to, achondroplasia, atlanto-occipital fusion, arthrogryposis mulitplex congenita, autosomal recessive muscular dystrophy, Becker's muscular dystrophy, cerebral palsy, choanal atresia, cleft lip, cleft palate, clubfoot, congenital amputation, congenital dislocation of the hip, congenital torticollis, congenital scoliosis, dopa-repsonsive dystonia, Duchenne muscular dystrophy, early-onset generalized dystonia, femoral torsion, Gorlin syndrome, hypophosphatasia, Klippel-Feil syndrome, knee dislocation, myoclonic dystonia, myotonic dystrophy, nail-patella syndrome, osteogenesis imperfecta, paroxysmal dystonia, progeria, prune-belly syndrome, rapid-onset dystonia parkinsonism, scolosis, syndactyly, Treacher Collins' syndrome, velocardiofacial syndrome, and X-linked dystonia-parkinsonism.

[0749] Developmental or hereditary disorders or defects of the excretory system that may be diagnosed, treated, and/or prevented with the compositions of the invention include, but are not limited to, Alport's syndrome, Bartter's syndrome, bladder diverticula, bladder exstrophy, cystinuria, epispadias, Fanconi's syndrome, Hartnup disease, horseshoe kidney, hypospadias, kidney agenesis, kidney ectopia, kidney malrotatioti, Liddle's syndrome, medullary cystic disease, medullary sponge, multicystic kidney, kidney polycystic kidney disease, nail-patella syndrome, Potter's syndrome, urinary tract flow obstruction, vitamin D-resistant rickets, and Wilm's tumor.

[0750] Cardiovascular disorders or defects of developmental or hereditary origin that may be diagnosed, treated, and/or prevented with the compositions of the inventtion include, but are not limited to, aortic valve stenosis, atrial septal defects, artioventricular (A-V) canal defect, bicuspid aortic valve, coarctation or the aorta, dextrocardia, Ebstein's anomaly, Eisenmenger's complex, hypoplastic left heart syndrome, Marfan syndrome, patent ductus arteriosus, progeria, pulmonary atresia, pulmonary valve stenosis, subaortic stenosis, tetralogy of fallot, total anomalous pulmonary venous (P-V) connection, transposition of the great arteries, tricuspid atresia, truncus arteriosus, ventricular septal defects. Developmental or inherited disorders resulting in disorders involving the hematopoietic system that may be diagnosed, treated, and/or prevented with the compositions of the invention include, but not limited to, Bernard-Soulier syndrome, Ch\acute{d}iak-Higashi syndrome, hemophilia, Hermansky-Pudlak syndrome, sickle cell anemia, storage pool disease, thromboxane A2 dysfunction, thrombasthenia, and von Willebrand's disease.

[0751] The compositions of the invention may also be used to diagnose, treat, and/or prevent developmental and inherited disorders resulting in disorders or defects of the gastrointestinal system, including, but not limited to, anal atresia, biliary atresia, esophageal atresia, diaphragmatic hernia, Hirschsprung's disease, Meckel's diverticulum, oligohydramnios, omphalocele, polyhydramnios, porphyria, situs inversus viscera. Developmental or inherited disorders resulting in metabolic disorders that may be diagnosed, treated, and/or prevented with the compositions of the invention include, but are not limited to, alpha-1 antitrypsin deficiency, cystic fibrosis, hemochromatosis, lysosomal storage disease, phenylketonuria, Wilson's disease, and Zellweger syndrome.

[0752] Disorders of the reproductive system that are developmentally or hereditary related that may also be diagnosed, treated, and/or prevented with the compositions of the invention include, but are not limited to, androgen insensitivity syndrome, ambiguous genitalia, autosomal sex reversal, congenital adreneal hyperplasia, gonadoblastoma, ovarian germ cell cancer, pseudohermphroditism, true hermaphroditism, undescended testis, XX male syndrome, and XY female type gonadal dysgenesis. The compositions of the invention may also be used to diagnose, treat, and/or prevent developmental or inherited respiratory defects including, but not limited to, askin tumor, azygos lobe, congenital diaphragmatic hernia, congenital lobar emphysema, cystic adenomatoid malformation, lobar emphysema, hyaline membrane disease, and pectus excavatum.

[0753] Developmental or inherited disorders may also result from chromosomal or genetic aberration that may be diagnosed, treated, and/or prevented with the compositions of the invention including, but not limited to, 4p- syndrome, cri du chat syndrome, Digeorge syndrome, Down's syndrome, Edward's syndrome, fragile X syndrome, Klinefelter's syndrome, Patau's syndrome, Prader-Willi syndrome, progeria, Turner's syndrome, triple X syndrome, and XYY syndrome. Other developmental disorders that can be diagnosed, treated, and/or prevented with the compositions of the invention, include, but are not limited to, fetal alcohol syndrome, and can be caused by environmental factors surrounding the developing fetus.

[0754] The compositions of the invention may further be able to be used to diagnose, treat, and/or prevent errors in development or a genetic disposition that may result in hyperproliferative disorders or neoplasms, including, but not limited to, acute childhood lymphoblastic leukemia, askin tumor, Beckwith-Wiedemann syndrome, childhood acute myeloid leukemia, childhood brain stem glioma, childhood cerebellar astrocytoma, childhood extracranial germ cell tumors childhood (primary), gonadoblastoma, hepatocellular cancer, childhood Hodgkin's disease, childhood Hodgkin's lymphoma, childhood hypothalamic and visual pathway glioma, childhood (primary) liver cancer, childhood lymphoblastic leukemia, childhood medulloblastoma, childhood non-Hodgkin's lymphoma, childhood pineal and supratentorial primitive neuroectodermal tumors, childhood primary liver cancer, childhood rhabdomyosarcoma, childhood soft tissue sarcoma, Gorlin syndrome, familial multiple endrocrine neoplasia type I, neuroblastoma, ovarian germ cell cancer, pheochromocytoma, retinoblastoma, and Wilm's tumor.

[0755] Polypeptides may be administered using any method known in the art, including, but not limited to, direct needle injection at the delivery site, intravenous injection, topical administration, catheter infusion, biolistic injectors, particle accelerators, gelfoam sponge depots, other commercially available depot materials, osmotic pumps, oral or suppositorial solid pharmaceutical formulations, decanting or topical applications during surgery, aerosol delivery. Such methods are known in the art. Polypeptides may be administered as part of a Therapeutic, described in more detail below. Methods of delivering polynucleotides are described in more detail herein.

[0756] Diseases at the Cellular Level Diseases associated with increased cell survival or the inhibition of apoptosis that could be treated, prevented, diagnosed and/or prognosed using polynucleotides or polypeptides, as well as antagonists or agonists of the present invention, include cancers (such as follicular lymphomas, carcinomas with p53 mutations, and hormone-dependent tumors, including, but not limited to colon cancer, cardiac tumors, pancreatic cancer, melanoma, retinoblastoma, glioblastoma, lung cancer, intestinal cancer, testicular cancer, stomach cancer, neuroblastoma, myxoma, myoma, lymphoma, endothelioma, osteoblastoma, osteoclastoma, osteosarcoma, chondrosarcoma, adenoma, breast cancer, prostate cancer, Kaposi's sarcoma and ovarian cancer); autoimmune disorders (such as, multiple sclerosis, Sjogren's syndrome, Hashimoto's thyroiditis, biliary cirrhosis, Behcet's disease, Crohn's disease, polymyositis, systemic lupus erythematosus and immune-related glomerulonephritis and rheumatoid arthritis) and viral infections (such as herpes viruses, pox viruses and adenoviruses), inflammation, graft v. host disease, acute graft rejection, and chronic graft rejection.

[0757] In preferred embodiments, polynucleotides, polypeptides, and/or antagonists of the invention are used to inhibit growth, progression, and/or metastasis of cancers, in particular those listed above involving colon tissues.

[0758] Additional diseases or conditions associated with increased cell survival that could be treated or detected by polynucleotides or polypeptides, or agonists or antagonists of the present invention include, but are not limited to, progression, and/or metastases of malignancies and related disorders such as leukemia (including acute leukemias (e.g., acute lymphocytic leukemia, acute myelocytic leukemia (including myeloblastic, promyelocytic, myelomonocytic, monocytic, and erythroleukemia)) and chronic leukemias (e.g., chronic myelocytic (granulocytic) leukemia and chronic lymphocytic leukemia)), polycythemia vera, lymphomas (e.g., Hodgkin's disease and non-Hodgkin's disease), multiple myeloma, Waldenstrom's macroglobulinemia, heavy chain disease, and solid tumors including, but not limited to, sarcomas and carcinomas such as fibrosarcoma, myxosarcoma, liposarcoma, chondrosarcoma, osteogenic sarcoma, chordoma, angiosarcoma, endotheliosarcoma, lymphangiosarcoma, lymphangioendotheliosarcoma, synovioma, mesothelioma, Ewing's tumor, leiomyosarcoma, rhabdomyosarcoma, colon carcinoma, pancreatic cancer, breast cancer, ovarian cancer, prostate cancer, squamous cell carcinoma, basal cell carcinoma, adenocarcinoma, sweat gland carcinoma, sebaceous gland carcinoma, papillary carcinoma, papillary adenocarcinomas, cystadenocarcinoma, medullary carcinoma, bronchogenic carcinoma, renal cell carcinoma, hepatoma, bile duct carcinoma, choriocarcinoma, seminoma, embryonal carcinoma, Wilm's tumor, cervical cancer, testicular tumor, lung carcinoma, small cell lung carcinoma, bladder carcinoma, epithelial carcinoma, glioma, astrocytoma, medulloblastoma, craniopharyngioma, ependymoma, pinealoma, hemangioblastoma, acoustic neuroma, oligodendroglioma, menangioma, melanoma, neuroblastoma, and retinoblastoma.

[0759] Diseases associated with increased apoptosis that could be treated, prevented, diagnosted, and/or prognosed using polynucleotides or polypeptides, as well as agonists or antagonists of the present invention, include, but are not limited to, AIDS; neurodegenerative disorders (such as Alzheimer's disease, Parkinson's disease, Amyotrophic lateral sclerosis, Retinitis pigmentosa, Cerebellar degeneration and brain tumor or prior associated disease); autoimmune disorders (such as, multiple sclerosis, Sjogren's syndrome, Hashimoto's thyroiditis, biliary cirrhosis, Behcet's disease, Crohn's disease, polymyositis, systemic lupus erythematosus and immune-related glomerulonephritis and rheumatoid arthritis) myelodysplastic syndromes (such as aplastic anemia), graft v. host disease, ischemic injury (such as that caused by myocardial infarction, stroke and reperfusion injury), liver injury (e.g., hepatitis related liver injury, ischemia/reperfusion injury, cholestosis (bile duct injury) and liver cancer); toxin-induced liver disease (such as that caused by alcohol), septic shock, cachexia and anorexia.

[0760] Wound Healing and Epithelial Cell Proliferation

[0761] In accordance with yet a further aspect of the present invention, there is provided a process for utilizing polynucleotides or polypeptides, as well as agonists or antagonists of the present invention, for therapeutic purposes, for example, to stimulate epithelial cell proliferation and basal keratinocytes for the purpose of wound healing, and to stimulate hair follicle production and healing of dermal wounds. Polynucleotides or polypeptides, as well as agonists or antagonists of the present invention, may be clinically useful in stimulating wound healing including surgical wounds, excisional wounds, deep wounds involving damage of the dermis and epidermis, eye tissue wounds, dental tissue wounds, oral cavity wounds, diabetic ulcers, dermal ulcers, cubitus ulcers, arterial ulcers, venous stasis ulcers, burns resulting from heat exposure or chemicals, and other abnormal wound healing conditions such as uremia, malnutrition, vitamin deficiencies and complications associated with systemic treatment with steroids, radiation therapy and antineoplastic drugs and antimetabolites. Polynucleotides or polypeptides, as well as agonists or antagonists of the present invention, could be used to promote dermal reestablishment subsequent to dermal loss.

[0762] Polynucleotides or polypeptides, as well as agonists or antagonists of the present invention, could be used to increase the adherence of skin grafts to a wound bed and to stimulate re-epithelialization from the wound bed. The following are types of grafts that polynucleotides or polypeptides, agonists or antagonists of the present invention, could be used to increase adherence to a wound bed: autografts, artificial skin, allografts, autodermic graft, autoepdermic grafts, avacular grafts, Blair-Brown grafts, bone graft, brephoplastic grafts, cutis graft, delayed graft, dermic graft, epidermic graft, fascia graft, full thickness graft, heterologous graft, xenograft, homologous graft, hyperplastic graft, lamellar graft, mesh graft, mucosal graft, Ollier-Thiersch graft, omenpal graft, patch graft, pedicle graft, penetrating graft, split skin graft, thick split graft. Polynucleotides or polypeptides, as well as agonists or antagonists of the present invention, can be used to promote skin strength and to improve the appearance of aged skin.

[0763] It is believed that polynucleotides or polypeptides, as well as agonists or antagonists of the present invention, will also produce changes in hepatocyte proliferation, and epithelial cell proliferation in the lung, breast, pancreas, stomach, small intestine, and large intestine. Polynucleotides or polypeptides, as well as agonists or antagonists of the present invention, could promote proliferation of epithelial cells such as sebocytes, hair follicles, hepatocytes, type II pneumocytes, mucin-producing goblet cells, and other epithelial cells and their progenitors contained within the skin, lung, liver, and gastrointestinal tract. Polynucleotides or polypeptides, agonists or antagonists of the present invention, may promote proliferation of endothelial cells, keratinocytes, and basal keratinocytes.

[0764] Polynucleotides or polypeptides, as well as agonists or antagonists of the present invention, could also be used to reduce the side effects of gut toxicity that result from radiation, chemotherapy treatments or viral infections. Polynucleotides or polypeptides, as well as agonists or antagonists of the present invention, may have a cytoprotective effect on the small intestine mucosa. Polynucleotides or polypeptides, as well as agonists or antagonists of the present invention, may also stimulate healing of mucositis (mouth ulcers) that result from chemotherapy and viral infections.

[0765] Polynucleotides or polypeptides, as well as agonists or antagonists of the present invention, could further be used in full regeneration of skin in full and partial thickness skin defects, including bums, (i.e., repopulation of hair follicles, sweat glands, and sebaceous glands), treatment of other skin defects such as psoriasis. Polynucleotides or polypeptides, as well as agonists or antagonists of the present invention, could be used to treat epidermolysis bullosa, a defect in adherence of the epidermis to the underlying dermis which results in frequent, open and painful blisters by accelerating reepithelialization of these lesions. Polynucleotides or polypeptides, as well as agonists or antagonists of the present invention, could also be used to treat gastric and doudenal ulcers and help heal by scar formation of the mucosal lining and regeneration of glandular mucosa and duodenal mucosal lining more rapidly. Inflammatory bowel diseases, such as Crohn's disease and ulcerative colitis, are diseases, which result in destruction of the mucosal surface of the small or large intestine, respectively. Thus, polynucleotides or polypeptides, as well as agonists or antagonists of the present invention, could be used to promote the resurfacing of the mucosal surface to aid more rapid healing and to prevent progression of inflammatory bowel disease. Treatment with polynucleotides or polypeptides, agonists or antagonists of the present invention, is expected to have a significant effect on the production of mucus throughout the gastrointestinal tract and could be used to protect the intestinal mucosa from injurious substances that are ingested or following surgery. Polynucleotides or polypeptides, as well as agonists or antagonists of the present invention, could be used to treat diseases associate with the under expression.

[0766] Moreover, polynucleotides or polypeptides, as well as agonists or antagonists of the present invention, could be used to prevent and heal damage to the lungs due to various pathological states. Polynucleotides or polypeptides, as well as agonists or antagonists of the present invention, could stimulate proliferation and differentiation and promote the repair of alveoli and brochiolar epithelium to prevent or treat acute or chronic lung damage. For example, emphysema, which results in the progressive loss of aveoli, and inhalation injuries, i.e., resulting from smoke inhalation and burns, that cause necrosis of the bronchiolar epithelium and alveoli could be effectively treated using polynucleotides or polypeptides, agonists or antagonists of the present invention. Also, polynucleotides or polypeptides, as well as agonists or antagonists of the present invention, could be used to stimulate the proliferation of and differentiation of type II pneumocytes, which may help treat or prevent disease such as hyaline membrane diseases, such as infant respiratory distress syndrome and bronchopulmonary displasia, in premature infants.

[0767] Polynucleotides or polypeptides, as well as agonists or antagonists of the present invention, could stimulate the proliferation and differentiation of hepatocytes and, thus, could be used to alleviate or treat liver diseases and pathologies such as fulminant liver failure caused by cirrhosis, liver damage caused by viral hepatitis and toxic substances (i.e., acetaminophen, carbon tetraholoride and other hepatotoxins known in the art).

[0768] In addition, polynucleotides or polypeptides, as well as agonists or antagonists of the present invention, could be used treat or prevent the onset of diabetes mellitus. In patients with newly diagnosed Types I and II diabetes, where some islet cell function remains, polynucleotides or polypeptides, as well as agonists or antagonists of the present invention, could be used to maintain the islet function so as to alleviate, delay or prevent permanent manifestation of the disease. Also, polynucleotides or polypeptides, as well as agonists or antagonists of the present invention, could be used as an auxiliary in islet cell transplantation to improve or promote islet cell function.

[0769] Infectious Disease

[0770] Polynucleotides or polypeptides, as well as agonists or antagonists of the present invention can be used to treat or detect infectious agents. For example, by increasing the immune response, particularly increasing the proliferation and differentiation of B and/or T cells, infectious diseases may be treated. The immune response may be increased by either enhancing an existing immune response, or by initiating a new immune response. Alternatively, polynucleotides or polypeptides, as well as agonists or antagonists of the present invention may also directly inhibit the infectious agent, without necessarily eliciting an immune response.

[0771] Viruses are one example of an infectious agent that can cause disease or symptoms that can be treated or detected by a polynucleotide or polypeptide and/or agonist or antagonist of the present invention. Examples of viruses, include, but are not limited to Examples of viruses, include, but are not limited to the following DNA and RNA viruses and viral families: Arbovirus, Adenoviridae, Arenaviridae, Arterivirus, Birnaviridae, Bunyaviridae, Caliciviridae, Circoviridae, Coronaviridae, Dengue, EBV, HIV, Flaviviridae, Hepadnaviridae (Hepatitis), Herpesviridae (such as, Cytomegalovirus, Herpes Simplex, Herpes Zoster), Mononegavirus (e.g., Paramyxoviridae, Morbillivirus, Rhabdoviridae), Orthomyxoviridae (e.g., Influenza A, Influenza B, and parainfluenza), Papiloma virus, Papovaviridae, Parvoviridae, Picornaviridae, Poxviridae (such as Smallpox or Vaccinia), Reoviridae (e.g., Rotavirus), Retroviridae (HTLV-I, HTLV-II, Lentivirus), and Togaviridae (e.g., Rubivirus). Viruses falling within these families can cause a variety of diseases or symptoms, including, but not limited to: arthritis, bronchiollitis, respiratory syncytial virus, encephalitis, eye infections (e.g., conjunctivitis, keratitis), chronic fatigue syndrome, hepatitis (A, B, C, E, Chronic Active, Delta), Japanese B encephalitis, Junin, Chikungunya, Rift Valley fever, yellow fever, meningitis, opportunistic infections (e.g., AIDS), pneumonia, Burkitt's Lymphoma, chickenpox, hemorrhagic fever, Measles, Mumps, Parainfluenza, Rabies, the common cold, Polio, leukemia, Rubella, sexually transmitted diseases, skin diseases (e.g., Kaposi's, warts), and viremia, polynucleotides or polypeptides, or agonists or antagonists of the invention, can be used to treat or detect any of these symptoms or diseases. In specific embodiments, polynucleotides, polypeptides, or agonists or antagonists of the invention are used to treat: meningitis, Dengue, EBV, and/or hepatitis (e.g., hepatitis B). In an additional specific embodiment polynucleotides, polypeptides, or agonists or antagonists of the invention are used to treat patients nonresponsive to one or more other commercially available hepatitis vaccines. In a further specific embodiment polynucleotides, polypeptides, or agonists or antagonists of the invention are used to treat AIDS.

[0772] Similarly, bacterial or fungal agents that can cause disease or symptoms and that can be treated or detected by a polynucleotide or polypeptide and/or agonist or antagonist of the present invention include, but not limited to, include, but not limited to, the following Gram-Negative and Gram-positive bacteria and bacterial families and fungi: Actinomycetales (e.g., Corynebacterium, Mycobacterium, Norcardia), Cryptococcus neoformans, Aspergillosis, Bacillaceae (e.g., Anthrax, Clostridium), Bacteroidaceae, Blastomycosis, Bordetella, Borrelia (e.g., Borrelia burgdorferi, Brucellosis, Candidiasis, Campylobacter, Coccidioidomycosis, Cryptococcosis, Dermatocycoses, E. coli (e.g., Enterotoxigenic E. coli and Enterohemorrhagic E. coli), Enterobacteriaceae (Klebsiella, Salmonella (e.g., Salmonella typhi, and Salmonella paratyphi), Serratia, Yersinia), Erysipelothrix, Helicobacter, Legionellosis, Leptospirosis, Listeria, Mycoplasmatales, Mycobacterium leprae, Vibrio cholerae, Neisseriaceae (e.g., Acinetobacter, Gonorrhea, Menigococcal), Meisseria meningitidis, Pasteurellacea Infections (e.g., Actinobacillus, Heamophilus (e.g., Heamophilus influenza type B), Pasteurella), Pseudomonas, Rickettsiaceae, Chlamydiaceae, Treponema spp., Leptospira spp., Shigella spp., Staphylococcal, Meningiococcal, Pneumococcal and Streptococcal (e.g., Streptococcus pneumoniae and Group B Streptococcus). These bacterial or fungal families can cause the following diseases or symptoms, including, but not limited to: bacteremia, endocarditis, eye infections (conjunctivitis, tuberculosis, uveitis), gingivitis, opportunistic infections (e.g., AIDS related infections), paronychia, prosthesis-related infections, Reiter's Disease, respiratory tract infections, such as Whooping Cough or Empyema, sepsis, Lyme Disease, Cat-Scratch Disease, Dysentery, Paratyphoid Fever, food poisoning, Typhoid, pneumonia, Gonorrhea, meningitis (e.g., mengitis types A and B), Chlamydia, Syphilis, Diphtheria, Leprosy, Paratuberculosis, Tuberculosis, Lupus, Botulism, gangrene, tetanus, impetigo, Rheumatic Fever, Scarlet Fever, sexually transmitted diseases, skin diseases (e.g., cellulitis, dermatocycoses), toxemia, urinary tract infections, wound infections. Polynucleotides or polypeptides, agonists or antagonists of the invention, can be used to treat or detect any of these symptoms or diseases. In specific embodiments, Ppolynucleotides, polypeptides, agonists or antagonists of the invention are used to treat: tetanus, Diptheria, botulism, and/or meningitis type B.

[0773] Moreover, parasitic agents causing disease or symptoms that can be treated or detected by a polynucleotide or polypeptide and/or agonist or antagonist of the present invention include, but not limited to, the following families or class: Amebiasis, Babesiosis, Coccidiosis, Cryptosporidiosis, Dientamoebiasis, Dourine, Ectoparasitic, Giardiasis, Helminthiasis, Leishmaniasis, Theileriasis, Toxoplasmosis, Trypanosomiasis, and Trichomonas and Sporozoans (e.g., Plasmodium virax, Plasmodium falciparium, Plasmodium malariae and Plasmodium ovale). These parasites can cause a variety of diseases or symptoms, including, but not limited to: Scabies, Trombiculiasis, eye infections, intestinal disease (e.g., dysentery, giardiasis), liver disease, lung disease, opportunistic infections (e.g., AIDS related), malaria, pregnancy complications, and toxoplasmosis, polynucleotides or polypeptides, or agonists or antagonists of the invention, can be used to treat or detect any of these symptoms or diseases.

[0774] Polynucleotides or polypeptides, as well as agonists or antagonists of the present invention of the present invention could either be by administering an effective amount of a polypeptide to the patient, or by removing cells from the patient, supplying the cells with a polynucleotide of the present invention, and returning the engineered cells to the patient (ex vivo therapy). Moreover, the polypeptide or polynucleotide of the present invention can be used as an antigen in a vaccine to raise an immune response against infectious disease.

[0775] Regeneration

[0776] Polynucleotides or polypeptides, as well as agonists or antagonists of the present invention can be used to differentiate, proliferate, and attract cells, leading to the regeneration of tissues. (See, Science 276:59-87 (1997).) The regeneration of tissues could be used to repair, replace, or protect tissue damaged by congenital defects, trauma (wounds, burns, incisions, or ulcers), age, disease (e.g. osteoporosis, osteocarthritis, periodontal disease, liver failure), surgery, including cosmetic plastic surgery, fibrosis, reperfusion injury, or systemic cytokine damage.

[0777] Tissues that could be regenerated using the present invention include organs (e.g., pancreas, liver, intestine, kidney, skin, endothelium), muscle (smooth, skeletal or cardiac), vasculature (including vascular and lymphatics), nervous, hematopoietic, and skeletal (bone, cartilage, tendon, and ligament) tissue. Preferably, regeneration occurs without or decreased scarring. Regeneration also may include angiogenesis.

[0778] Moreover, polynucleotides or polypeptides, as well as agonists or antagonists of the present invention, may increase regeneration of tissues difficult to heal. For example, increased tendon/ligament regeneration would quicken recovery time after damage. Polynucleotides or polypeptides, as well as agonists or antagonists of the present invention could also be used prophylactically in an effort to avoid damage. Specific diseases that could be treated include of tendinitis, carpal tunnel syndrome, and other tendon or ligament defects. A further example of tissue regeneration of non-healing wounds includes pressure ulcers, ulcers associated with vascular insufficiency, surgical, and traumatic wounds.

[0779] Similarly, nerve and brain tissue could also be regenerated by using polynucleotides or polypeptides, as well as agonists or antagonists of the present invention, to proliferate and differentiate nerve cells. Diseases that could be treated using this method include central and peripheral nervous system diseases, neuropathies, or mechanical and traumatic disorders (e.g., spinal cord disorders, head trauma, cerebrovascular disease, and stoke). Specifically, diseases associated with peripheral nerve injuries, peripheral neuropathy (e.g., resulting from chemotherapy or other medical therapies), localized neuropathies, and central nervous system diseases (e.g., Alzheimer's disease, Parkinson's disease, Huntington's disease, amyotrophic lateral sclerosis, and Shy-Drager syndrome), could all be treated using the polynucleotides or polypeptides, as well as agonists or antagonists of the present invention.

[0780] Chemotaxis

[0781] Polynucleotides or polypeptides, as well as agonists or antagonists of the present invention may have chemotaxis activity. A chemotaxic molecule attracts or mobilizes cells (e.g., monocytes, fibroblasts, neutrophils, T-cells, mast cells, eosinophils, epithelial and/or endothelial cells) to a particular site in the body, such as inflammation, infection, or site of hyperproliferation. The mobilized cells can then fight off and/or heal the particular trauma or abnormality.

[0782] Polynucleotides or polypeptides, as well as agonists or antagonists of the present invention may increase chemotaxic activity of particular cells. These chemotactic molecules can then be used to treat inflammation, infection, hyperproliferative disorders, or any immune system disorder by increasing the number of cells targeted to a particular location in the body. For example, chemotaxic molecules can be used to treat wounds and other trauma to tissues by attracting immune cells to the injured location. Chemotactic molecules of the present invention can also attract fibroblasts, which can be used to treat wounds.

[0783] It is also contemplated that polynucleotides or polypeptides, as well as agonists or antagonists of the present invention may inhibit chemotactic activity. These molecules could also be used to treat disorders. Thus, polynucleotides or polypeptides, as well as agonists or antagonists of the present invention could be used as an inhibitor of chemotaxis.

[0784] Binding Activity

[0785] A polypeptide of the present invention may be used to screen for molecules that bind to the polypeptide or for molecules to which the polypeptide binds. The binding of the polypeptide and the molecule may activate (agonist), increase, inhibit (antagonist), or decrease activity of the polypeptide or the molecule bound. Examples of such molecules include antibodies, oligonucleotides, proteins (e.g., receptors),or small molecules.

[0786] Preferably, the molecule is closely related to the natural ligand of the polypeptide, e.g., a fragment of the ligand, or a natural substrate, a ligand, a structural or functional mimetic. (See, Coligan et al., Current Protocols in Immunology 1(2):Chapter 5 (1991).) Similarly, the molecule can be closely related to the natural receptor to which the polypeptide binds, or at least, a fragment of the receptor capable of being bound by the polypeptide (e.g., active site). In either case, the molecule can be rationally designed using known techniques.

[0787] Preferably, the screening for these molecules involves producing appropriate cells, which express the polypeptide. Preferred cells include cells from mammals, yeast, Drosophila, or E. coli. Cells expressing the polypeptide (or cell membrane containing the expressed polypeptide) are then preferably contacted with a test compound potentially containing the molecule to observe binding, stimulation, or inhibition of activity of either the polypeptide or the molecule.

[0788] The assay may simply test binding of a candidate compound to the polypeptide, wherein binding is detected by a label, or in an assay involving competition with a labeled competitor. Further, the assay may test whether the candidate compound results in a signal generated by binding to the polypeptide.

[0789] Alternatively, the assay can be carried out using cell-free preparations, polypeptide/molecule affixed to a solid support, chemical libraries, or natural product mixtures. The assay may also simply comprise the steps of mixing a candidate compound with a solution containing a polypeptide, measuring polypeptide/molecule activity or binding, and comparing the polypeptide/molecule activity or binding to a standard.

[0790] Preferably, an ELISA assay can measure polypeptide level or activity in a sample (e.g., biological sample) using a monoclonal or polyclonal antibody. The antibody can measure polypeptide level or activity by either binding, directly or indirectly, to the polypeptide or by competing with the polypeptide for a substrate.

[0791] Additionally, the receptor to which the polypeptide of the present invention binds can be identified by numerous methods known to those of skill in the art, for example, ligand panning and FACS sorting (Coligan, et al., Current Protocols in Immun., 1(2), Chapter 5, (1991)). For example, expression cloning is employed wherein polyadenylated RNA is prepared from a cell responsive to the polypeptides, for example, NIH3T3 cells which are known to contain multiple receptors for the FGF family proteins, and SC-3 cells, and a cDNA library created from this RNA is divided into pools and used to transfect COS cells or other cells that are not responsive to the polypeptides. Transfected cells which are grown on glass slides are exposed to the polypeptide of the present invention, after they have been labeled. The polypeptides can be labeled by a variety of means including iodination or inclusion of a recognition site for a site-specific protein kinase.

[0792] Following fixation and incubation, the slides are subjected to auto-radiographic analysis. Positive pools are identified and sub-pools are prepared and re-transfected using an iterative sub-pooling and re-screening process, eventually yielding a single clones that encodes the putative receptor.

[0793] As an alternative approach for receptor identification, the labeled polypeptides can be photoaffinity linked with cell membrane or extract preparations that express the receptor molecule. Cross-linked material is resolved by PAGE analysis and exposed to X-ray film. The labeled complex containing the receptors of the polypeptides can be excised, resolved into peptide fragments, and subjected to protein microsequencing. The amino acid sequence obtained from microsequencing would be used to design a set of degenerate oligonucleotide probes to screen a cDNA library to identify the genes encoding the putative receptors.

[0794] Moreover, the techniques of gene-shuffling, motif-shuffling, exon-shuffling, and/or codon-shuffling (collectively referred to as “DNA shuffling”) may be employed to modulate the activities of the polypeptide of the present invention thereby effectively generating agonists and antagonists of the polypeptide of the present invention. See generally, U.S. Pat. Nos. 5,605,793, 5,811,238, 5,830,721, 5,834,252, and 5,837,458, and Patten, P. A., et al., Curr. Opinion Biotechnol. 8:724-33 (1997); Harayama, S. Trends Biotechnol. 16(2):76-82 (1998); Hansson L. O., et al., J. Mol. Biol. 287:265-76 (1999); and Lorenzo, M. M. and Blasco, R. Biotechniques 24(2):308-13 (1998); each of these patents and publications are hereby incorporated by reference). In one embodiment, alteration of polynucleotides and corresponding polypeptides may be achieved by DNA shuffling. DNA shuffling involves the assembly of two or more DNA segments into a desired molecule by homologous, or site-specific, recombination. In another embodiment, polynucleotides and corresponding polypeptides may be altered by being subjected to random mutagenesis by error-prone PCR, random nucleotide insertion or other methods prior to recombination. In another embodiment, one or more components, motifs, sections, parts, domains, fragments, etc., of the polypeptide of the present invention may be recombined with one or more components, motifs, sections, parts, domains, fragments, etc. of one or more heterologous molecules. In preferred embodiments, the heterologous molecules are family members. In further preferred embodiments, the heterologous molecule is a growth factor such as, for example, platelet-derived growth factor (PDGF), insulin-like growth factor (IGF-I), transforming growth factor (TGF)-alpha, epidermal growth factor (EGF), fibroblast growth factor (FGF), TGF-beta, bone morphogenetic protein (BMP)-2, BMP-4, BMP-5, BMP-6, BMP-7, activins A and B, decapentaplegic(dpp), 60A, OP-2, dorsalin, growth differentiation factors (GDFs), nodal, MIS, inhibin-alpha, TGF-beta1, TGF-beta2, TGF-beta3, TGF-beta5, and glial-derived neurotrophic factor (GDNF).

[0795] Other preferred fragments are biologically active fragments of the polypeptide of the present invention. Biologically active fragments are those exhibiting activity similar, but not necessarily identical, to an activity of the polypeptide of the present invention. The biological activity of the fragments may include an improved desired activity, or a decreased undesirable activity.

[0796] Additionally, this invention provides a method of screening compounds to identify those, which modulate the action of the polypeptide of the present invention. An example of such an assay comprises combining a mammalian fibroblast cell, the polypeptide of the present invention, the compound to be screened and ³[H] thymidine under cell culture conditions where the fibroblast cell would normally proliferate. A control assay may be performed in the absence of the compound to be screened and compared to the amount of fibroblast proliferation in the presence of the compound to determine if the compound stimulates proliferation by determining the uptake of ³[H] thymidine in each case. The amount of fibroblast cell proliferation is measured by liquid scintillation chromatography, which measures the incorporation of ³[H] thymidine. Both agonist and antagonist compounds may be identified by this procedure.

[0797] In another method, a mammalian cell or membrane preparation expressing a receptor for a polypeptide of the present invention is incubated with a labeled polypeptide of the present invention in the presence of the compound. The ability of the compound to enhance or block this interaction could then be measured. Alternatively, the response of a known second messenger system following interaction of a compound to be screened and the receptor is measured and the ability of the compound to bind to the receptor and elicit a second messenger response is measured to determine if the compound is a potential agonist or antagonist. Such second messenger systems include but are not limited to, cAMP guanylate cyclase, ion channels or phosphoinositide hydrolysis.

[0798] All of these above assays can be used as diagnostic or prognostic markers. The molecules discovered using these assays can be used to treat disease or to bring about a particular result in a patient (e.g., blood vessel growth) by activating or inhibiting the polypeptide/molecule. Moreover, the assays can discover agents which may inhibit or enhance the production of the polypeptides of the invention from suitably manipulated cells or tissues.

[0799] Therefore, the invention includes a method of identifying compounds which bind to a polypeptide of the invention comprising the steps of: (a) incubating a candidate binding compound with a polypeptide of the present invention; and (b) determining if binding has occurred. Moreover, the invention includes a method of identifying agonists/antagonists comprising the steps of: (a) incubating a candidate compound with a polypeptide of the present invention, (b) assaying a biological activity, and (b) determining if a biological activity of the polypeptide has been altered.

[0800] Targeted Delivery

[0801] In another embodiment, the invention provides a method of delivering compositions to targeted cells expressing a receptor for a polypeptide of the invention, or cells expressing a cell bound form of a polypeptide of the invention.

[0802] As discussed herein, polypeptides or antibodies of the invention may be associated with heterologous polypeptides, heterologous nucleic acids, toxins, or prodrugs via hydrophobic, hydrophilic, ionic and/or covalent interactions. In one embodiment, the invention provides a method for the specific delivery of compositions of the invention to cells by administering polypeptides of the invention (including antibodies) that are associated with heterologous polypeptides or nucleic acids. In one example, the invention provides a method for delivering a therapeutic protein into the targeted cell. In another example, the invention provides a method for delivering a single stranded nucleic acid (e.g., antisense or ribozymes) or double stranded nucleic acid (e.g., DNA that can integrate into the cell's genome or replicate episomally and that can be transcribed) into the targeted cell.

[0803] In another embodiment, the invention provides a method for the specific destruction of cells (e.g., the destruction of tumor cells) by administering polypeptides of the invention (e.g., polypeptides of the invention or antibodies of the invention) in association with toxins or cytotoxic prodrugs.

[0804] By “toxin” is meant compounds that bind and activate endogenous cytotoxic effector systems, radioisotopes, holotoxins, modified toxins, catalytic subunits of toxins, or any molecules or enzymes not normally present in or on the surface of a cell that under defined conditions cause the cell's death. Toxins that may be used according to the methods of the invention include, but are not limited to, radioisotopes known in the art, compounds such as, for example, antibodies (or complement fixing containing portions thereof) that bind an inherent or induced endogenous cytotoxic effector system, thymidine kinase, endonuclease, RNAse, alpha toxin, ricin, abrin, Pseudomonas exotoxin A, diphtheria toxin, saporin, momordin, gelonin, pokeweed antiviral protein, alpha-sarcin and cholera toxin. By “cytotoxic prodrug” is meant a non-toxic compound that is converted by an enzyme, normally present in the cell, into a cytotoxic compound. Cytotoxic prodrugs that may be used according to the methods of the invention include, but are not limited to, glutamyl derivatives of benzoic acid mustard alkylating agent, phosphate derivatives of etoposide or mitomycin C, cytosine arabinoside, daunorubisin, and phenoxyacetamide derivatives of doxorubicin.

[0805] Drug Screening

[0806] Further contemplated is the use of the polypeptides of the present invention, or the polynucleotides encoding these polypeptides, to screen for molecules, which modify the activities of the polypeptides of the present invention. Such a method would include contacting the polypeptide of the present invention with a selected compound(s) suspected of having antagonist or agonist activity, and assaying the activity of these polypeptides following binding.

[0807] This invention is particularly useful for screening therapeutic compounds by using the polypeptides of the present invention, or binding fragments thereof, in any of a variety of drug screening techniques. The polypeptide or fragment employed in such a test may be affixed to a solid support, expressed on a cell surface, free in solution, or located intracellularly. One method of drug screening utilizes eukaryotic or prokaryotic host cells which are stably transformed with recombinant nucleic acids expressing the polypeptide or fragment. Drugs are screened against such transformed cells in competitive binding assays. One may measure, for example, the formulation of complexes between the agent being tested and a polypeptide of the present invention.

[0808] Thus, the present invention provides methods of screening for drugs or any other agents, which affect activities mediated by the polypeptides of the present invention. These methods comprise contacting such an agent with a polypeptide of the present invention or a fragment thereof and assaying for the presence of a complex between the agent and the polypeptide or a fragment thereof, by methods well known in the art. In such a competitive binding assay, the agents to screen are typically labeled. Following incubation, free agent is separated from that present in bound form, and the amount of free or uncomplexed label is a measure of the ability of a particular agent to bind to the polypeptides of the present invention.

[0809] Another technique for drug screening provides high throughput screening for compounds having suitable binding affinity to the polypeptides of the present invention, and is described in great detail in European Patent Application 84/03564, published on Sep. 13, 1984, which is incorporated herein by reference herein. Briefly stated, large numbers of different small peptide test compounds are synthesized on a solid substrate, such as plastic pins or some other surface. The peptide test compounds are reacted with polypeptides of the present invention and washed. Bound polypeptides are then detected by methods well known in the art. Purified polypeptides are coated directly onto plates for use in the aforementioned drug screening techniques. In addition, non-neutralizing antibodies may be used to capture the peptide and immobilize it on the solid support.

[0810] This invention also contemplates the use of competitive drug screening assays in which neutralizing antibodies capable of binding polypeptides of the present invention specifically compete with a test compound for binding to the polypeptides or fragments thereof. In this manner, the antibodies are used to detect the presence of any peptide which shares one or more antigenic epitopes with a polypeptide of the invention.

[0811] Antisense And Ribozyme (Antagonists)

[0812] In specific embodiments, antagonists according to the present invention are nucleic acids corresponding to the sequences contained in SEQ ID NO:X, or the complementary strand thereof, and/or to cDNA sequences contained in cDNA Clone ID NO:Z identified for example, in Table 1A. In one embodiment, antisense sequence is generated internally, by the organism, in another embodiment, the antisense sequence is separately administered (see, for example, O'Connor, J., Neurochem. 56:560 (1991). Oligodeoxynucleotides as Antisense Inhibitors of Gene Expression, CRC Press, Boca Raton, Fla. (1988). Antisense technology can be used to control gene expression through antisense DNA or RNA, or through triple-helix formation. Antisense techniques are discussed for example, in Okano, J., Neurochem. 56:560 (1991); Oligodeoxynucleotides as Antisense Inhibitors of Gene Expression, CRC Press, Boca Raton, Fla. (1988). Triple helix formation is discussed in, for instance, Lee et al., Nucleic Acids Research 6:3073 (1979); Cooney et al., Science 241:456 (1988); and Dervan et al., Science 251:1300 (1991). The methods are based on binding of a polynucleotide to a complementary DNA or RNA.

[0813] For example, the use of c-myc and c-myb antisense RNA constructs to inhibit the growth of the non-lymphocytic leukemia cell line HL-60 and other cell lines was previously described. (Wickstrom et al. (1988); Anfossi et al. (1989)). These experiments were performed in vitro by incubating cells with the oligoribonucleotide. A similar procedure for in vivo use is described in WO 91/15580. Briefly, a pair of oligonucleotides for a given antisense RNA is produced as follows: A sequence complimentary to the first 15 bases of the open reading frame is flanked by an EcoR1 site on the 5′ end and a HindlIl site on the 3′ end. Next, the pair of oligonucleotides is heated at 90° C. for one minute and then annealed in 2× ligation buffer (20mM TRIS HCl pH 7.5, 10 mM MgCl2, 10 MM dithiothreitol (DTT) and 0.2 mM ATP) and then ligated to the EcoR1/Hind III site of the retroviral vector PMV7 (WO 91/15580).

[0814] For example, the 5′ coding portion of a polynucleotide that encodes the polypeptide of the present invention may be used to design an antisense RNA oligonucleotide of from about 10 to 40 base pairs in length. A DNA oligonucleotide is designed to be complementary to a region of the gene involved in transcription thereby preventing transcription and the production of the receptor. The antisense RNA oligonucleotide hybridizes to the mRNA in vivo and blocks translation of the mRNA molecule into receptor potypeptide.

[0815] In one embodiment, the antisense nucleic acid of the invention is produced intracellularly by transcription from an exogenous sequence. For example, a vector or a portion thereof, is transcribed, producing an antisense nucleic acid (RNA) of the invention. Such a vector would contain a sequence encoding the antisense nucleic acid. Such a vector can remain episomal or become chromosomally integrated, as long as it can be transcribed to produce the desired antisense RNA. Such vectors can be constructed by recombinant DNA technology methods standard in the art. Vectors can be plasmid, viral, or others known in the art, used for replication and expression in vertebrate cells. Expression of the sequence encoding the polypeptide of the present invention or fragments thereof, can be by any promoter known in the art to act in vertebrate, preferably human cells. Such promoters can be inducible or constitutive. Such promoters include, but are not limited to, the SV40 early promoter region (Bernoist and Chambon, Nature 29:304-310 (1981), the promoter contained in the 3′ long terminal repeat of Rous sarcoma virus (Yamamoto et al., Cell 22:787-797 (1980), the herpes thymidine promoter (Wagner et al., Proc. Natl. Acad. Sci. U.S.A. 78:1441-1445 (1981), the regulatory sequences of the metallothionein gene (Brinster, et al., Nature 296:39-42 (1982)), etc.

[0816] The antisense nucleic acids of the invention comprise a sequence complementary to at least a portion of an RNA transcript of a gene of the present invention. However, absolute complementarity, although preferred, is not required. A sequence “complementary to at least a portion of an RNA,” referred to herein, means a sequence having sufficient complementarity to be able to hybridize with the RNA, forming a stable duplex; in the case of double stranded antisense nucleic acids, a single strand of the duplex DNA may thus be tested, or triplex formation may be assayed. The ability to hybridize will depend on both the degree of complementarity and the length of the antisense nucleic acid. Generally, the larger the hybridizing nucleic acid, the more base mismatches with a RNA it may contain and still form a stable duplex (or triplex as the case may be). One skilled in the art can ascertain a tolerable degree of mismatch by use of standard procedures to determine the melting point of the hybridized complex.

[0817] Oligonucleotides that are complementary to the 5′ end of the message, e.g., the 5′ untranslated sequence up to and including the AUG initiation codon, should work most efficiently at inhibiting translation. However, sequences complementary to the 3′ untranslated sequences of mRNAs have been shown to be effective at inhibiting translation of mRNAs as well. See generally, Wagner, R., 1994, Nature 372:333-335. Thus, oligonucleotides complementary to either the 5′- or 3′- non-translated, non-coding regions of polynucleotide sequences described herein could be used in an antisense approach to inhibit translation of endogenous mRNA. Oligonucleotides complementary to the 5′ untranslated region of the mRNA should include the complement of the AUG start codon. Antisense oligonucleotides complementary to mRNA coding regions are less efficient inhibitors of translation but could be used in accordance with the invention. Whether designed to hybridize to the 5′-, 3′- or coding region of mRNA of the present invention, antisense nucleic acids should be at least six nucleotides in length, and are preferably oligonucleotides ranging from 6 to about 50 nucleotides in length. In specific aspects the oligonucleotide is at least 10 nucleotides, at least 17 nucleotides, at least 25 nucleotides or at least 50 nucleotides.

[0818] The polynucleotides of the invention can be DNA or RNA or chimeric mixtures or derivatives or modified versions thereof, single-stranded or double-stranded. The oligonucleotide can be modified at the base moiety, sugar moiety, or phosphate backbone, for example, to improve stability of the molecule, hybridization, etc. The oligonucleotide may include other appended groups such as peptides (e.g., for targeting host cell receptors in vivo), or agents facilitating transport across the cell membrane (see, e.g., Letsinger et al., 1989, Proc. Natl. Acad. Sci. U.S.A. 86:6553-6556; Lemaitre et al., 1987, Proc. Natl. Acad. Sci. 84:648-652; PCT Publication No. WO88/09810, published Dec. 15, 1988) or the blood-brain barrier (see, e.g., PCT Publication No. WO89/10134, published Apr. 25, 1988), hybridization-triggered cleavage agents. (See, e.g., Krol et al., 1988, BioTechniques 6:958-976) or intercalating agents. (See, e.g., Zon, 1988, Pharm. Res. 5:539-549). To this end, the oligonucleotide may be conjugated to another molecule, e.g., a peptide, hybridization triggered cross-linking agent, transport agent, hybridization-triggered cleavage agent, etc.

[0819] The antisense oligonucleotide may comprise at least one modified base moiety which is selected from the group including, but not limited to, 5-fluorouracil, 5-bromouracil, 5-chlorouracil, 5-iodouracil, hypoxanthine, xantine, 4-acetylcytosine, 5-(carboxyhydroxylmethyl) uracil, 5-carboxymethylaminomethyl-2-thiouridine, 5-carboxymethylaminomethyluracil, dihydrouracil, beta-D-galactosylqueosine, inosine, N6-isopentenyladenine, 1-methylguanine, 1-methylinosine, 2,2-dimethylguanine, 2-methyladenine, 2-methylguanine, 3-methylcytosine, 5-methylcytosine, N6- adenine, 7-methylguanine, 5-methylaminomethyluracil, 5-methoxyaminomethyl-2-thiouracil, beta-D-mannosylqueosine, 5′-methoxycarboxymethyluracil, 5-methoxyuracil, 2-methylthio-N6-isopentenyladenine, uracil-5-oxyacetic acid (v), wybutoxosine, pseudouracil, queosine, 2-thiocytosine, 5-methyl-2-thiouracil, 2-thiouracil, 4-thiouracil, 5-methyluracil, uracil5-oxyacetic acid methylester, uracil-5-oxyacetic acid (v), 5-methyl-2-thiouracil, 3-(3-amino-3-N-2-carboxypropyl) uracil, (acp3)w, and 2,6-diaminopurine.

[0820] The antisense oligonucleotide may also comprise at least one modified sugar moiety selected from the group including, but not limited to, arabinose, 2-fluoroarabinose, xylulose, and hexose.

[0821] In yet another embodiment, the antisense oligonucleotide comprises at least one modified phosphate backbone selected from the group including, but not limited to, a phosphorothioate, a phosphorodithioate, a phosphoramidothioate, a phosphoramidate, a phosphordiamidate, a methylphosphonate, an alkyl phosphotriester, and a formacetal or analog thereof.

[0822] In yet another embodiment, the antisense oligonucleotide is an a-anomeric oligonucleotide. An a-anomeric oligonucleotide forms specific double-stranded hybrids with complementary RNA in which, contrary to the usual b-units, the strands run parallel to each other (Gautier et al., 1987, Nucl. Acids Res. 15:6625-6641). The oligonucleotide is a 2′-0-methylribonucleotide (Inoue et al., 1987, Nucl. Acids Res. 15:6131-6148), or a chimeric RNA-DNA analogue (Inoue et al., 1987, FEBS Lett. 215:327-330).

[0823] Polynucleotides of the invention may be synthesized by standard methods known in the art, e.g. by use of an automated DNA synthesizer (such as are commercially available from Biosearch, Applied Biosystems, etc.). As examples, phosphorothioate oligonucleotides may be synthesized by the method of Stein et al. (1988, Nucl. Acids Res. 16:3209), methylphosphonate oligonucleotides can be prepared by use of controlled pore glass polymer supports (Sarin et al., 1988, Proc. Natl. Acad. Sci. U.S.A. 85:7448-7451), etc.

[0824] While antisense nucleotides complementary to the coding region sequence could be used, those complementary to the transcribed untranslated region are most preferred.

[0825] Potential antagonists according to the invention also include catalytic RNA, or a ribozyme (See, e.g., PCT International Publication WO 90/11364, published Oct. 4, 1990; Sarver et al, Science 247:1222-1225 (1990). While ribozymes that cleave mRNA at site specific recognition sequences can be used to destroy mRNAs, the use of hammerhead ribozymes is preferred. Hammerhead ribozymes cleave mRNAs at locations dictated by flanking regions that form complementary base pairs with the target mRNA. The sole requirement is that the target mRNA have the following sequence of two bases: 5′-UG-3′. The construction and production of hammerhead ribozymes is well known in the art and is described more fully in Haseloff and Gerlach, Nature 334:585-591 (1988). There are numerous potential hammerhead ribozyme cleavage sites within the nucleotide sequence of SEQ ID NO:X. Preferably, the ribozyme is engineered so that the cleavage recognition site is located near the 5′ end of the mRNA; i.e., to increase efficiency and minimize the intracellular accumulation of non-functional mRNA transcripts.

[0826] As in the antisense approach, the ribozymes of the invention can be composed of modified oligonucleotides (for improved stability, targeting, etc.) and should be delivered to cells which express in vivo. DNA constructs encoding the ribozyme may be introduced into the cell in the same manner as described above for the introduction of antisense encoding DNA. A preferred method of delivery involves using a DNA construct “encoding” the ribozyme under the control of a strong constitutive promoter, such as, for example, pol III or pol II promoter, so that transfected cells will produce sufficient quantities of the ribozyme to destroy endogenous messages and inhibit translation. Since ribozymes unlike antisense molecules, are catalytic, a lower intracellular concentration is required for efficiency.

[0827] Antagonist/agonist compounds may be employed to inhibit the cell growth and proliferation effects of the polypeptides of the present invention on neoplastic cells and tissues, i.e. stimulation of angiogenesis of tumors, and, therefore, retard or prevent abnormal cellular growth and proliferation, for example, in tumor formation or growth.

[0828] The antagonist/agonist may also be employed to prevent hyper-vascular diseases, and prevent the proliferation of epithelial lens cells after extracapsular cataract surgery. Prevention of the mitogenic activity of the polypeptides of the present invention may also be desirous in cases such as restenosis after balloon angioplasty.

[0829] The antagonist/agonist may also be employed to prevent the growth of scar tissue during wound healing.

[0830] The antagonist/agonist may also be employed to treat the diseases described herein.

[0831] Thus, the invention provides a method of treating disorders or diseases, including but not limited to the disorders or diseases listed throughout this application, associated with overexpression of a polynucleotide of the present invention by administering to a patient (a) an antisense molecule directed to the polynucleotide of the present invention, and/or (b) a ribozyme directed to the polynucleotide of the present invention.

[0832] Binding Peptides and Other Molecules

[0833] The invention also encompasses screening methods for identifying polypeptides and nonpolypeptides that bind colon antigen polypeptides, and the colon antigen binding molecules identified thereby. These binding molecules are useful, for example, as agonists and antagonists of the colon antigen polypeptides. Such agonists and antagonists can be used, in accordance with the invention, in the therapeutic embodiments described in detail, below.

[0834] This method comprises the steps of:

[0835] contacting colon antigen polypeptides or colon antigen-like polypeptides with a plurality of molecules; and

[0836] identifying a molecule that binds the colon antigen polypeptides or colon antigen-like polypeptides.

[0837] The step of contacting the colon antigen polypeptides or colon antigen-like polypeptides with the plurality of molecules may be effected in a number of ways. For example, one may contemplate immobilizing the colon antigen polypeptides or colon antigen-like polypeptides on a solid support and bringing a solution of the plurality of molecules in contact with the immobilized colon antigen polypeptides or colon antigen-like polypeptides. Such a procedure would be akin to an affinity chromatographic process, with the affinity matrix being comprised of the immobilized colon antigen polypeptides or colon antigen-like polypeptides. The molecules having a selective affinity for the colon antigen polypeptides or colon antigen-like polypeptides can then be purified by affinity selection. The nature of the solid support, process for attachment of the colon antigen polypeptides or colon antigen-like polypeptides to the solid support, solvent, and conditions of the affinity isolation or selection are largely conventional and well known to those of ordinary skill in the art.

[0838] Alternatively, one may also separate a plurality of polypeptides into substantially separate fractions comprising a subset of or individual polypeptides. For instance, one can separate the plurality of polypeptides by gel electrophoresis, column chromatography, or like method known to those of ordinary skill for the separation of polypeptides. The individual polypeptides can also be produced by a transformed host cell in such a way as to be expressed on or about its outer surface (e.g., a recombinant phage). Individual isolates can then be “probed” by the colon antigen polypeptides or colon antigen-like polypeptides, optionally in the presence of an inducer should one be required for expression, to determine if any selective affinity interaction takes place between the colon antigen polypeptides or colon antigen-like polypeptides and the individual clone. Prior to contacting the colon antigen polypeptides or colon antigen-like polypeptides with each fraction comprising individual polypeptides, the polypeptides could first be transferred to a solid support for additional convenience. Such a solid support may simply be a piece of filter membrane, such as one made of nitrocellulose or nylon. In this manner, positive clones could be identified from a collection of transformed host cells of an expression library, which harbor a DNA construct encoding a polypeptide having a selective affinity for colon antigen polypeptides or colon antigen-like polypeptides. Furthermore, the amino acid sequence of the polypeptide having a selective affinity for the colon antigen polypeptides or colon antigen-like polypeptides can be determined directly by conventional means or the coding sequence of the DNA encoding the polypeptide can frequently be determined more conveniently. The primary sequence can then be deduced from the corresponding DNA sequence. If the amino acid sequence is to be determined from the polypeptide itself, one may use microsequencing techniques. The sequencing technique may include mass spectroscopy.

[0839] In certain situations, it may be desirable to wash away any unbound colon antigen polypeptides or colon antigen-like polypeptides, or alternatively, unbound polypeptides, from a mixture of the colon antigen polypeptides or colon antigen-like polypeptides and the plurality of polypeptides prior to attempting to determine or to detect the presence of a selective affinity interaction. Such a wash step may be particularly desirable when the colon antigen polypeptides or colon antigen-like polypeptides or the plurality of polypeptides is bound to a solid support.

[0840] The plurality of molecules provided according to this method may be provided by way of diversity libraries, such as random or combinatorial peptide or nonpeptide libraries which can be screened for molecules that specifically bind colon antigen polypeptides. Many libraries are known in the art that can be used, e.g., chemically synthesized libraries, recombinant (e.g., phage display libraries), and in vitro translation-based libraries. Examples of chemically synthesized libraries are described in Fodor et al., 1991, Science 251:767-773; Houghten et al., 1991, Nature 354:84-86; Lam et al., 1991, Nature 354:82-84; Medynski, 1994, Bio/Technology 12:709-710;Gallop et al., 1994, J. Medicinal Chemistry 37(9):1233-1251; Ohlmeyer et al., 1993, Proc. Natl. Acad. Sci. USA 90:10922-10926; Erb et al., 1994, Proc. Natl. Acad. Sci. USA 91:11422-11426; Houghten et al., 1992, Biotechniques 13:412; Jayawickreme et al., 1994, Proc. Natl. Acad. Sci. USA 91:1614-1618; Salmon et al., 1993, Proc. Natl. Acad. Sci. USA 90:11708-11712; PCT Publication No. WO 93/20242; and Brenner and Lerner, 1992, Proc. Natl. Acad. Sci. USA 89:5381-5383.

[0841] Examples of phage display libraries are described in Scott and Smith, 1990, Science 249:386-390; Devlin et al., 1990, Science, 249:404-406; Christian, R. B., et al., 1992, J. Mol. Biol. 227:711-718); Lenstra, 1992, J. Immunol. Meth. 152:149-157; Kay et al., 1993, Gene 128:59-65; and PCT Publication No. WO 94/18318 dated Aug. 18, 1994.

[0842] In vitro translation-based libraries include but are not limited to those described in PCT Publication No. WO 91/05058 dated Apr. 18, 1991; and Mattheakis et al., 1994, Proc. Natl. Acad. Sci. USA 91:9022-9026.

[0843] By way of examples of nonpeptide libraries, a benzodiazepine library (see e.g., Bunin et al., 1994, Proc. Natl. Acad. Sci. USA 91:4708-4712) can be adapted for use. Peptoid libraries (Simon et al., 1992, Proc. Natl. Acad. Sci. USA 89:9367-9371) can also be used. Another example of a library that can be used, in which the amide functionalities in peptides have been permethylated to generate a chemically transformed combinatorial library, is described by Ostresh et al. (1994, Proc. Natl. Acad. Sci. USA 91:11138-11142).

[0844] The variety of non-peptide libraries that are useful in the present invention is great. For example, Ecker and Crooke, 1995, Bio/Technology 13:351-360 list benzodiazepines, hydantoins, piperazinediones, biphenyls, sugar analogs, beta-mercaptoketones, arylacetic acids, acylpiperidines, benzopyrans, cubanes, xanthines, aminimides, and oxazolones as among the chemical species that form the basis of various libraries.

[0845] Non-peptide libraries can be classified broadly into two types: decorated monomers and oligomers. Decorated monomer libraries employ a relatively simple scaffold structure upon which a variety functional groups is added. Often the scaffold will be a molecule with a known useful pharmacological activity. For example, the scaffold might be the benzodiazepine structure.

[0846] Non-peptide oligomer libraries utilize a large number of monomers that are assembled together in ways that create new shapes that depend on the order of the monomers. Among the monomer units that have been used are carbamates, pyrrolinones, and morpholinos. Peptoids, peptide-like oligomers in which the side chain is attached to the alpha amino group rather than the alpha carbon, form the basis of another version of non-peptide oligomer libraries. The first non-peptide oligomer libraries utilized a single type of monomer and thus contained a repeating backbone. Recent libraries have utilized more than one monomer, giving the libraries added flexbility.

[0847] Screening the libraries can be accomplished by any of a variety of commonly known methods. See, e.g., the following references, which disclose screening of peptide libraries: Parmley and Smith, 1989, Adv. Exp. Med. Biol. 251:215-218; Scott and Smith, 1990, Science 249:386-390; Fowlkes et al., 1992; BioTechniques 13:422-427; Oldenburg et al., 1992, Proc. Natl. Acad. Sci. USA 89:5393-5397; Yu et al., 1994, Cell 76:933-945; Staudt et al., 1988, Science 241:577-580; Bock et al., 1992, Nature 355:564-566; Tuerk et al., 1992, Proc. Natl. Acad. Sci. USA 89:6988-6992; Ellington et al., 1992, Nature 355:850-852; U.S. Pat. No. 5,096,815, U.S. Pat. No. 5,223,409, and U.S. Pat. No. 5,198,346, all to Ladner et al.; Rebar and Pabo, 1993, Science 263:671-673; and CT Publication No. WO 94/18318.

[0848] In a specific embodiment, screening to identify a molecule that binds colon antigen polypeptides can be carried out by contacting the library members with a colon antigen polypeptides or colon colon antigen-like polypeptides immobilized on a solid phase and harvesting those library members that bind to the colon antigen polypeptides or colon antigen-like polypeptides. Examples of such screening methods, termed “panning” techniques are described by way of example in Parmley and Smith, 1988, Gene 73:305-318; Fowlkes et al., 1992, BioTechniques 13:422-427; International Publication No. WO 94/18318; and in references cited herein.

[0849] In another embodiment, the two-hybrid system for selecting interacting proteins in yeast (Fields and Song, 1989, Nature 340:245-246; Chien et al., 1991, Proc. Natl. Acad. Sci. USA 88:9578-9582) can be used to identify molecules that specifically bind to colon antigen polypeptides or colon antigen-like polypeptides.

[0850] Where the colon antigen binding molecule is a polypeptide, the polypeptide can be conveniently selected from any peptide library, including random peptide libraries, combinatorial peptide libraries, or biased peptide libraries. The term “biased” is used herein to mean that the method of generating the library is manipulated so as to restrict one or more parameters that govern the diversity of the resulting collection of molecules, in this case peptides.

[0851] Thus, a truly random peptide library would generate a collection of peptides in which the probability of finding a particular amino acid at a given position of the peptide is the same for all 20 amino acids. A bias can be introduced into the library, however, by specifying, for example, that a lysine occurs every fifth amino acid or that positions 4, 8, and 9 of a decapeptide library be fixed to include only arginine. Clearly, many types of biases can be contemplated, and the present invention is not restricted to any particular bias. Furthermore, the present invention contemplates specific types of peptide libraries, such as phage displayed peptide libraries and those that utilize a DNA construct comprising a lambda phage vector with a DNA insert.

[0852] As mentioned above, in the case of a colon antigen binding molecule that is a polypeptide, the polypeptide may have about 6 to less than about 60 amino acid residues, preferably about 6 to about 10 amino acid residues, and most preferably, about 6 to about 22 amino acids. In another embodiment, a colon antigen binding polypeptide has in the range of 15-100 amino acids, or 20-50 amino acids.

[0853] The selected colon antigen binding polypeptide can be obtained by chemical synthesis or recombinant expression.

[0854] Other Activities

[0855] A polypeptide, polynucleotide, agonist, or antagonist of the present invention, as a result of the ability to stimulate vascular endothelial cell growth, may be employed in treatment for stimulating re-vascularization of ischemic tissues due to various disease conditions such as thrombosis, arteriosclerosis, and other cardiovascular conditions. The polypeptide, polynucleotide, agonist, or antagonist of the present invention may also be employed to stimulate angiogenesis and limb regeneration, as discussed above.

[0856] A polypeptide, polynucleotide, agonist, or antagonist of the present invention may also be employed for treating wounds due to injuries, burns, post-operative tissue repair, and ulcers since they are mitogenic to various cells of different origins, such as fibroblast cells and skeletal muscle cells, and therefore, facilitate the repair or replacement of damaged or diseased tissue.

[0857] A polypeptide, polynucleotide, agonist, or antagonist of the present invention may also be employed to stimulate neuronal growth and to treat and prevent neuronal damage which occurs in certain neuronal disorders or neuro-degenerative conditions such as Alzheimer's disease, Parkinson's disease, and AIDS-related complex. A polypeptide, polynucleotide, agonist, or antagonist of the present invention may have the ability to stimulate chondrocyte growth; therefore, they may be employed to enhance bone and periodontal regeneration and aid in tissue transplants or bone grafts.

[0858] A polypeptide, polynucleotide, agonist, or antagonist of the present invention may be also employed to prevent skin aging due to sunburn by stimulating keratinocyte growth.

[0859] A polypeptide, polynucleotide, agonist, or antagonist of the present invention may also be employed for preventing hair loss, since FGF family members activate hair-forming cells and promotes melanocyte growth. Along the same lines, a polypeptide, polynucleotide, agonist, or antagonist of the present invention may be employed to stimulate growth and differentiation of hematopoietic cells and bone marrow cells when used in combination with other cytokines.

[0860] A polypeptide, polynucleotide, agonist, or antagonist of the present invention may also be employed to maintain organs before transplantation or for supporting cell culture of primary tissues. A polypeptide, polynucleotide, agonist, or antagonist of the present invention may also be employed for inducing tissue of mesodermal origin to differentiate in early embryos.

[0861] A polypeptide, polynucleotide, agonist, or antagonist of the present invention may also increase or decrease the differentiation or proliferation of embryonic stem cells, besides, as discussed above, hematopoietic lineage.

[0862] A polypeptide, polynucleotide, agonist, or antagonist of the present invention may also be used to modulate mammalian characteristics, such as body height, weight, hair color, eye color, skin, percentage of adipose tissue, pigmentation, size, and shape (e.g., cosmetic surgery). Similarly, a polypeptide, polynucleotide, agonist, or antagonist of the present invention may be used to modulate mammalian metabolism affecting catabolism, anabolism, processing, utilization, and storage of energy.

[0863] A polypeptide, polynucleotide, agonist, or antagonist of the present invention may be used to change a mammal's mental state or physical state by influencing biorhythms, caricadic rhythms, depression (including depressive disorders), tendency for violence, tolerance for pain, reproductive capabilities (preferably by Activin or Inhibin-like activity), hormonal or endocrine levels, appetite, libido, memory, stress, or other cognitive qualities.

[0864] A polypeptide, polynucleotide, agonist, or antagonist of the present invention may also be used as a food additive or preservative, such as to increase or decrease storage capabilities, fat content, lipid, protein, carbohydrate, vitamins, minerals, cofactors or other nutritional components.

[0865] The above-recited applications have uses in a wide variety of hosts. Such hosts include, but are not limited to, human, murine, rabbit, goat, guinea pig, camel, horse, mouse, rat, hamster, pig, micro-pig, chicken, goat, cow, sheep, dog, cat, non-human primate, and human. In specific embodiments, the host is a mouse, rabbit, goat, guinea pig, chicken, rat, hamster, pig, sheep, dog or cat. In preferred embodiments, the host is a mammal. In most preferred embodiments, the host is a human.

[0866] Other Preferred Embodiments

[0867] Other preferred embodiments of the claimed invention include an isolated nucleic acid molecule comprising a nucleotide sequence which is at least 95% identical to a sequence of at least about 50 contiguous nucleotides in the nucleotide sequence of SEQ ID NO:X or the complementary strand thereto, the nucleotide sequence as defined in column 4 of Table 1A or columns 8 and 9 of Table 2 or the complementary strand thereto, and/or cDNA contained in Clone ID NO:Z.

[0868] Also preferred is a nucleic acid molecule wherein said sequence of contiguous nucleotides is included in the nucleotide sequence of the portion of SEQ ID NO:X as defined in column 4, “ORF (From-To)”, in Table 1A.

[0869] Also preferred is a nucleic acid molecule wherein said sequence of contiguous nucleotides is included in the nucleotide sequence of the portion of SEQ ID NO:X as defined in columns 8 and 9, “NT From” and “NT To” respectively, in Table 2.

[0870] Also preferred is an isolated nucleic acid molecule comprising a nucleotide sequence which is at least 95% identical to a sequence of at least about 150 contiguous nucleotides in the nucleotide sequence of SEQ ID NO:X or the complementary strand thereto, the nucleotide sequence as defined in column 4 of Table 1A or columns 8 and 9 of Table 2 or the complementary strand thereto, and/or cDNA contained in Clone ID NO:Z.

[0871] Further preferred is an isolated nucleic acid molecule comprising a nucleotide sequence which is at least 95% identical to a sequence of at least about 500 contiguous nucleotides in the nucleotide sequence of SEQ ID NO:X or the complementary strand thereto, the nucleotide sequence as defined in column 4 of Table 1A or columns 8 and 9 of Table 2 or the complementary strand thereto, and/or cDNA contained in Clone ID NO:Z.

[0872] A further preferred embodiment is a nucleic acid molecule comprising a nucleotide sequence which is at least 95% identical to the nucleotide sequence of the portion of SEQ ID NO:X defined in column 4, “ORF (From-To)”, in Table 1A.

[0873] A further preferred embodiment is a nucleic acid molecule comprising a nucleotide sequence which is at least 95% identical to the nucleotide sequence of the portion of SEQ ID NO:X defined in columns 8 and 9, “NT From” and “NT To”, respectively, in Table 2.

[0874] A further preferred embodiment is an isolated nucleic acid molecule comprising a nucleotide sequence which is at least 95% identical to the complete nucleotide sequence of SEQ ID NO:X or the complementary strand thereto, the nucleotide sequence as defined in column 4 of Table 1A or columns 8 and 9 of Table 2 or the complementary strand thereto, and/or cDNA contained in Clone ID NO:Z.

[0875] Also preferred is an isolated nucleic acid molecule which hybridizes under stringent hybridization conditions to a nucleic acid molecule comprising a nucleotide sequence of SEQ ID NO:X or the complementary strand thereto, the nucleotide sequence as defined in column 4 of Table 1A or columns 8 and 9 of Table 2 or the complementary strand thereto, and/or cDNA contained in Clone ID NO:Z, wherein said nucleic acid molecule which hybridizes does not hybridize under stringent hybridization conditions to a nucleic acid molecule having a nucleotide sequence consisting of only A residues or of only T residues.

[0876] Also preferred is a composition of matter comprising a DNA molecule which comprises the cDNA contained in Clone ID NO:Z.

[0877] Also preferred is an isolated nucleic acid molecule comprising a nucleotide sequence which is at least 95% identical to a sequence of at least 50 contiguous nucleotides of the cDNA sequence contained in Clone ID NO:Z.

[0878] Also preferred is an isolated nucleic acid molecule, wherein said sequence of at least 50 contiguous nucleotides is included in the nucleotide sequence of an open reading frame sequence encoded by cDNA contained in Clone ID NO:Z.

[0879] Also preferred is an isolated nucleic acid molecule comprising a nucleotide sequence which is at least 95% identical to sequence of at least 150 contiguous nucleotides in the nucleotide sequence encoded by cDNA contained in Clone ID NO:Z.

[0880] A further preferred embodiment is an isolated nucleic acid molecule comprising a nucleotide sequence which is at least 95% identical to sequence of at least 500 contiguous nucleotides in the nucleotide sequence encoded by cDNA contained in Clone ID NO:Z.

[0881] A further preferred embodiment is an isolated nucleic acid molecule comprising a nucleotide sequence which is at least 95% identical to the complete nucleotide sequence encoded by cDNA contained in Clone ID NO:Z.

[0882] A further preferred embodiment is a method for detecting in a biological sample a nucleic acid molecule comprising a nucleotide sequence which is at least 95% identical to a sequence of at least 50 contiguous nucleotides in a sequence selected from the group consisting of: a nucleotide sequence of SEQ ID NO:X or the complementary strand thereto; the nucleotide sequence as defined in column 4 of Table 1A or columns 8 and 9 of Table 2 or the complementary strand thereto; and a nucleotide sequence encoded by cDNA contained in Clone ID NO:Z; which method comprises a step of comparing a nucleotide sequence of at least one nucleic acid molecule in said sample with a sequence selected from said group and determining whether the sequence of said nucleic acid molecule in said sample is at least 95% identical to said selected sequence.

[0883] Also preferred is the above method wherein said step of comparing sequences comprises determining the extent of nucleic acid hybridization between nucleic acid molecules in said sample and a nucleic acid molecule comprising said sequence selected from said group. Similarly, also preferred is the above method wherein said step of comparing sequences is performed by comparing the nucleotide sequence determined from a nucleic acid molecule in said sample with said sequence selected from said group. The nucleic acid molecules can comprise DNA molecules or RNA molecules.

[0884] A further preferred embodiment is a method for identifying the species, tissue or cell type of a biological sample which method comprises a step of detecting nucleic acid molecules in said sample, if any, comprising a nucleotide sequence that is at least 95% identical to a sequence of at least 50 contiguous nucleotides in a sequence selected from the group consisting of: a nucleotide sequence of SEQ ID NO:X or the complementary strand thereto; the nucleotide sequence as defined in column 4 of Table 1A or columns 8 and 9 of Table 2 or the complementary strand thereto; and a nucleotide sequence of the cDNA contained in Clone ID NO:Z.

[0885] The method for identifying the species, tissue or cell type of a biological sample can comprise a step of detecting nucleic acid molecules comprising a nucleotide sequence in a panel of at least two nucleotide sequences, wherein at least one sequence in said panel is at least 95% identical to a sequence of at least 50 contiguous nucleotides in a sequence selected from said group.

[0886] Also preferred is a method for diagnosing in a subject a pathological condition associated with abnormal structure or expression of a nucleotide sequence of SEQ ID NO:X or the complementary strand thereto; the nucleotide sequence as defined in column 4 of Table 1A or columns 8 and 9 of Table 2 or the complementary strand thereto; or the cDNA contained in Clone ID NO:Z which encodes a protein, wherein the method comprises a step of detecting in a biological sample obtained from said subject nucleic acid molecules, if any, comprising a nucleotide sequence that is at least 95% identical to a sequence of at least 50 contiguous nucleotides in a sequence selected from the group consisting of: a nucleotide sequence of SEQ ID NO:X or the complementary strand thereto; the nucleotide sequence as defined in column 4 of Table 1A or columns 8 and 9 of Table 2 or the complementary strand thereto; and a nucleotide sequence of cDNA contained in Clone ID NO:Z.

[0887] The method for diagnosing a pathological condition can comprise a step of detecting nucleic acid molecules comprising a nucleotide sequence in a panel of at least two nucleotide sequences, wherein at least one sequence in said panel is at least 95% identical to a sequence of at least 50 contiguous nucleotides in a sequence selected from said group.

[0888] Also preferred is a composition of matter comprising isolated nucleic acid molecules wherein the nucleotide sequences of said nucleic acid molecules comprise a panel of at least two nucleotide sequences, wherein at least one sequence in said panel is at least 95% identical to a sequence of at least 50 contiguous nucleotides in a sequence selected from the group consisting of: a nucleotide sequence of SEQ ID NO:X or the complementary strand thereto; the nucleotide sequence as defined in column 4 of Table 1A or columns 8 and 9 of Table 2 or the complementary strand thereto; and a nucleotide sequence encoded by cDNA contained in Clone ID NO:Z. The nucleic acid molecules can comprise DNA molecules or RNA molecules.

[0889] Also preferred is a composition of matter comprising isolated nucleic acid molecules wherein the nucleotide sequences of said nucleic acid molecules comprise a DNA microarray or “chip” of at least 1, 2, 3, 4, 5, 6, 7, 8, 9, 10, 15, 20, 25, 30, 40, 50, 100, 150, 200, 250, 300, 500, 1000, 2000, 3000, or 4000 nucleotide sequences, wherein at least one sequence in said DNA microarray or “chip” is at least 95% identical to a sequence of at least 50 contiguous nucleotides in a sequence selected from the group consisting of: a nucleotide sequence of SEQ ID NO:X wherein X is any integer as defined in Table 1A; and a nucleotide sequence encoded by a human cDNA clone identified by a cDNA “Clone ID” in Table 1A.

[0890] Also preferred is an isolated polypeptide comprising an amino acid sequence at least 90% identical to a sequence of at least about 10 contiguous amino acids in the polypeptide sequence of SEQ ID NO:Y; a polypeptide encoded by SEQ ID NO:X or the complementary strand thereto; the polypeptide encoded by the nucleotide sequence as defined in columns 8 and 9 of Table 2; and/or a polypeptide encoded by cDNA contained in Clone ID NO:Z.

[0891] Also preferred is an isolated polypeptide comprising an amino acid sequence at least 95% identical to a sequence of at least about 30 contiguous amino acids in the amino acid sequence of SEQ ID NO:Y; a polypeptide encoded by SEQ ID NO:X or the complementary strand thereto; the polypeptide encoded by the nucleotide sequence as defined in columns 8 and 9 of Table 2; and/or a polypeptide encoded by cDNA contained in Clone ID NO:Z.

[0892] Further preferred is an isolated polypeptide comprising an amino acid sequence at least 95% identical to a sequence of at least about 100 contiguous amino acids in the amino acid sequence of SEQ ID NO:Y; a polypeptide encoded by SEQ ID NO:X or the complementary strand thereto; the polypeptide encoded by the nucleotide sequence as defined in columns 8 and 9 of Table 2; and/or a polypeptide encoded by cDNA contained in Clone ID NO:Z.

[0893] Further preferred is an isolated polypeptide comprising an amino acid sequence at least 95% identical to the complete amino acid sequence of SEQ ID NO:Y; a polypeptide encoded by SEQ ID NO:X or the complementary strand thereto; the polypeptide encoded by the nucleotide sequence as defined in columns 8 and 9 of Table 2; and/or a polypeptide encoded by cDNA contained in Clone ID NO:Z.

[0894] Further preferred is an isolated polypeptide comprising an amino acid sequence at least 90% identical to a sequence of at least about 10 contiguous amino acids in the complete amino acid sequence of a polypeptide encoded by contained in Clone ID NO:Z

[0895] Also preferred is a polypeptide wherein said sequence of contiguous amino acids is included in the amino acid sequence of a portion of said polypeptide encoded by cDNA contained in Clone ID NO:Z; a polypeptide encoded by SEQ ID NO:X or the complementary strand thereto; the polypeptide encoded by the nucleotide sequence as defined in columns 8 and 9 of Table 2; and/or the polypeptide sequence of SEQ ID NO:Y.

[0896] Also preferred is an isolated polypeptide comprising an amino acid sequence at least 95% identical to a sequence of at least about 30 contiguous amino acids in the amino acid sequence of a polypeptide encoded by the cDNA contained in Clone ID NO:Z.

[0897] Also preferred is an isolated polypeptide comprising an amino acid sequence at least 95% identical to a sequence of at least about 100 contiguous amino acids in the amino acid sequence of a polypeptide encoded by cDNA contained in Clone ID NO:Z.

[0898] Also preferred is an isolated polypeptide comprising an amino acid sequence at least 95% identical to the amino acid sequence of a polypeptide encoded by the cDNA contained in Clone ID NO:Z.

[0899] Further preferred is an isolated antibody which binds specifically to a polypeptide comprising an amino acid sequence that is at least 90% identical to a sequence of at least 10 contiguous amino acids in a sequence selected from the group consisting of: a polypeptide sequence of SEQ ID NO:Y; a polypeptide encoded by SEQ ID NO:X or the complementary strand thereto; the polypeptide encoded by the nucleotide sequence as defined in columns 8 and 9 of Table 2; and a polypeptide encoded by the cDNA contained in Clone ID NO:Z.

[0900] Further preferred is a method for detecting in a biological sample a polypeptide comprising an amino acid sequence which is at least 90% identical to a sequence of at least 10 contiguous amino acids in a sequence selected from the group consisting of: a polypeptide sequence of SEQ ID NO:Y; a polypeptide encoded by SEQ ID NO:X or the complementary strand thereto; the polypeptide encoded by the nucleotide sequence as defined in columns 8 and 9 of Table 2; and a polypeptide encoded by the cDNA contained in Clone ID NO:Z; which method comprises a step of comparing an amino acid sequence of at least one polypeptide molecule in said sample with a sequence selected from said group and determining whether the sequence of said polypeptide molecule in said sample is at least 90% identical to said sequence of at least 10 contiguous amino acids.

[0901] Also preferred is the above method wherein said step of comparing an amino acid sequence of at least one polypeptide molecule in said sample with a sequence selected from said group comprises determining the extent of specific binding of polypeptides in said sample to an antibody which binds specifically to a polypeptide comprising an amino acid sequence that is at least 90% identical to a sequence of at least 10 contiguous amino acids in a sequence selected from the group consisting of: a polypeptide sequence of SEQ ID NO:Y; a polypeptide encoded by SEQ ID NO:X or the complementary strand thereto; the polypeptide encoded by the nucleotide sequence as defined in columns 8 and 9 of Table 2; and a polypeptide encoded by the cDNA contained in Clone ID NO:Z.

[0902] Also preferred is the above method wherein said step of comparing sequences is performed by comparing the amino acid sequence determined from a polypeptide molecule in said sample with said sequence selected from said group.

[0903] Also preferred is a method for identifying the species, tissue or cell type of a biological sample which method comprises a step of detecting polypeptide molecules in said sample, if any, comprising an amino acid sequence that is at least 90% identical to a sequence of at least 10 contiguous amino acids in a sequence selected from the group consisting of: polypeptide sequence of SEQ ID NO:Y; a polypeptide encoded by SEQ ID NO:X or the complementary strand thereto; the polypeptide encoded by the nucleotide sequence as defined in columns 8 and 9 of Table 2; and a polypeptide encoded by the cDNA contained in Clone ID NO:Z.

[0904] Also preferred is the above method for identifying the species, tissue or cell type of a biological sample, which method comprises a step of detecting polypeptide molecules comprising an amino acid sequence in a panel of at least two amino acid sequences, wherein at least one sequence in said panel is at least 90% identical to a sequence of at least 10 contiguous amino acids in a sequence selected from the above group.

[0905] Also preferred is a method for diagnosing in a subject a pathological condition associated with abnormal structure or expression of a nucleic acid sequence identified in Table 1A or Table 2 encoding a polypeptide, which method comprises a step of detecting in a biological sample obtained from said subject polypeptide molecules comprising an amino acid sequence in a panel of at least two amino acid sequences, wherein at least one sequence in said panel is at least 90% identical to a sequence of at least 10 contiguous amino acids in a sequence selected from the group consisting of: polypeptide sequence of SEQ ID NO:Y; a polypeptide encoded by SEQ ID NO:X or the complementary strand thereto; the polypeptide encoded by the nucleotide sequence as defined in columns 8 and 9 of Table 2; and a polypeptide encoded by the cDNA contained in Clone ID NO:Z.

[0906] In any of these methods, the step of detecting said polypeptide molecules includes using an antibody.

[0907] Also preferred is an isolated nucleic acid molecule comprising a nucleotide sequence which is at least 95% identical to a nucleotide sequence encoding a polypeptide wherein said polypeptide comprises an amino acid sequence that is at least 90% identical to a sequence of at least 10 contiguous amino acids in a sequence selected from the group consisting of: polypeptide sequence of SEQ ID NO:Y; a polypeptide encoded by SEQ ID NO:X or the complementary strand thereto; the polypeptide encoded by the nucleotide sequence as defined in columns 8 and 9 of Table 2; and a polypeptide encoded by the cDNA contained in Clone ID NO:Z.

[0908] Also preferred is an isolated nucleic acid molecule, wherein said nucleotide sequence encoding a polypeptide has been optimized for expression of said polypeptide in a prokaryotic host.

[0909] Also preferred is a polypeptide molecule, wherein said polypeptide comprises an amino acid sequence selected from the group consisting of: polypeptide sequence of SEQ ID NO:Y; a polypeptide encoded by SEQ ID NO:X or the complementary strand thereto; the polypeptide encoded by the nucleotide sequence as defined in columns 8 and 9 of Table 2; and a polypeptide encoded by the cDNA contained in Clone ID NO:Z.

[0910] Further preferred is a method of making a recombinant vector comprising inserting any of the above isolated nucleic acid molecule into a vector. Also preferred is the recombinant vector produced by this method. Also preferred is a method of making a recombinant host cell comprising introducing the vector into a host cell, as well as the recombinant host cell produced by this method. culturing this recombinant host cell under conditions such that said polypeptide is expressed and recovering said polypeptide. Also preferred is this method of making an isolated polypeptide, wherein said recombinant host cell is a eukaryotic cell and said polypeptide is a human protein comprising an amino acid sequence selected from the group consisting of: polypeptide sequence of SEQ ID NO:Y; a polypeptide encoded by SEQ ID NO:X or the complementary strand thereto; the polypeptide encoded by the nucleotide sequence as defined in columns 8 and 9 of Table 2; and a polypeptide encoded by the cDNA contained in Clone ID NO:Z. The isolated polypeptide produced by this method is also preferred.

[0911] Also preferred is a method of treatment of an individual in need of an increased level of a protein activity, which method comprises administering to such an individual a Therapeutic comprising an amount of an isolated polypeptide, polynucleotide, immunogenic fragment or analogue thereof, binding agent, antibody, or antigen binding fragment of the claimed invention effective to increase the level of said protein activity in said individual.

[0912] Also preferred is a method of treatment of an individual in need of a decreased level of a protein activity, which method comprised administering to such an individual a Therapeutic comprising an amount of an isolated polypeptide, polynucleotide, immunogenic fragment or analogue thereof, binding agent, antibody, or antigen binding fragment of the claimed invention effective to decrease the level of said protein activity in said individual.

[0913] Also preferred is a method of treatment of an individual in need of a specific delivery of toxic compositions to diseased cells (e.g., tumors, leukemias or lymphomas), which method comprises administering to such an individual a Therapeutic comprising an amount of an isolated polypeptide of the invention, including, but not limited to a binding agent, or antibody of the claimed invention that are associated with toxin or cytotoxic prodrugs.

[0914] Having generally described the invention, the same will be more readily understood by reference to the following examples, which are provided by way of illustration and are not intended as limiting.

TABLE 6

| ATCC Deposits | Deposit Date | ATCC Designation Number |
|---|---|---|
| LP01, LP02, LP03, | May 20, 1997 | 209059, 209060, 209061, 209062, |
| LP04, LP05, LP06, | | 209063, 209064, 209065, 209066, |
| LP07, LP08, LP09, | | 209067, 209068, 209069 |
| LP10, LP11, | | |
| LP12 | Jan. 12, 1998 | 209579 |
| LP13 | Jan. 12, 1998 | 209578 |
| LP14 | Jul. 16, 1998 | 203067 |
| LP15 | Jul. 16, 1998 | 203068 |
| LP16 | Feb. 1, 1999 | 203609 |
| LP17 | Feb. 1, 1999 | 203610 |
| LP20 | Nov. 17, 1998 | 203485 |
| LP21 | Jun. 18, 1999 | PTA-252 |
| LP22 | Jun. 18, 1999 | PTA-253 |
| LP23 | Dec. 22, 1999 | PTA-1081 |

### EXAMPLES

### Example 1

[0915] Isolation of a Selected cDNA Clone From the Deposited Sample

[0916] Each Clone ID NO:Z is contained in a plasmid. Table 7 identifies the vectors used to construct the cDNA library from which each clone was isolated. In many cases, the vector used to construct the library is a phage vector from which a plasmid has been excised. The following correlates the related plasmid for each phage vector used in constructing the cDNA library. For example, where a particular clone is identified in Table 7 as being isolated in the vector “Lambda Zap,” the corresponding deposited clone is in “pBluescript.”

| Vector Used to Construct Library | Corresponding Deposited Plasmid |
|---|---|
| Lambda Zap | pBluescript (pBS) |
| Uni-Zap XR | pBluescript (pBS) |
| Zap Express | pBK |
| lafmid BA | plafmid BA |
| pSport 1 | pSport 1 |
| pCMVSport 2.0 | pCMVSport 2.0 |
| pCMVSport 3.0 | pCMVSport 3.0 |
| pCR ®2.1 | pCR ®2.1 |

[0917] Vectors Lambda Zap (U.S. Pat. Nos. 5,128,256 and 5,286,636), Uni-Zap XR (U.S. Pat. Nos. 5,128, 256 and 5,286,636), Zap Express (U.S. Pat. Nos. 5,128,256 and 5,286,636), pBluescript (pBS) (Short, J. M. et al., Nucleic Acids Res. 16:7583-7600 (1988); Alting-Mees, M. A. and Short, J. M., Nucleic Acids Res. 17:9494 (1989)) and pBK (Alting-Mees, M. A. et al., Strategies 5:58-61 (1992)) are commercially available from Stratagene Cloning Systems, Inc., 11011 N. Torrey Pines Road, La Jolla, Calif., 92037. pBS contains an ampicillin resistance gene and pBK contains a neomycin resistance gene. Both can be transformed into E. coli strain XL-1 Blue, also available from Stratagene. pBS comes in 4 forms SK+, SK−, KS+ and KS. The S and K refers to the orientation of the polylinker to the T7 and T3 primer sequences which flank the polylinker region (“S” is for SacI and “K” is for KpnI which are the first sites on each respective end of the linker). “+” or “−” refer to the orientation of the f1 origin of replication (“ori”), such that in one orientation, single stranded rescue initiated from the f1 ori generates sense strand DNA and in the other, antisense.

[0918] Vectors pSport1, pCMVSport 2.0 and pCMVSport 3.0, were obtained from Life Technologies, Inc., P. O. Box 6009, Gaithersburg, Md. 20897. All Sport vectors contain an ampicillin resistance gene and may be transformed into E. coli strain DH10B, also available from Life Technologies. (See, for instance, Gruber, C. E., et al., Focus 15:59 (1993).) Vector lafmid BA (Bento Soares, Columbia University, NY) contains an ampicillin resistance gene and can be transformed into E. coli strain XL-1 Blue. Vector pCR®2.1, which is available from Invitrogen, 1600 Faraday Avenue, Carlsbad, Calif. 92008, contains an ampicillin resistance gene and may be transformed into E. coli strain DH10B, available from Life Technologies. (See, for instance, Clark, J. M., Nuc. Acids Res. 16:9677-9686 (1988) and Mead, D. et al., Bio/Technology 9: (1991).) Preferably, a polynucleotide of the present invention does not comprise the vector sequences identified for the particular clone in Table 7, as well as the corresponding plasmid vector sequences designated above.

[0919] The deposited material in the sample assigned the ATCC Deposit Number cited by reference to Tables 1, 2, 6 and 7 for any given cDNA clone also may contain one or more additional plasmids, each comprising a CDNA clone different from that given clone. Thus, deposits sharing the same ATCC Deposit Number contain at least a plasmid for each Clone ID NO:Z.

TABLE 7

| | | | ATCC |
|---|---|---|---|
| Libraries owned by Catalog | Catalog Description | Vector | Deposit |
| HUKA HUKB HUKC HUKD HUKE | Human Uterine Cancer | Lambda ZAP II | LP01 |
| HUKF HUKG | | | |
| HCNA HCNB | Human Colon | Lambda Zap II | LP01 |
| HFFA | Human Fetal Brain, random primed | Lambda Zap II | LP01 |
| HTWA | Resting T-Cell | Lambda ZAP II | LP01 |
| HBQA | Early Stage Human Brain, random | Lambda ZAP II | LP01 |
| | primed | | |
| HLMB HLMF HLMG HLMH HLMI | breast lymph node CDNA library | Lambda ZAP II | LP01 |
| HLMJ HLMM HLMN | | | |
| HCQA HCQB | human colon cancer | Lamda ZAP II | LP01 |
| HMEA HMEC HMED HMEE HMEF | Human Microvascular Endothelial | Lambda ZAP II | LP01 |
| HMEG HMEI HMEJ HMEK HMEL | Cells, fract. A | | |
| HUSA HUSC | Human Umbilical Vein Endothelial | Lambda ZAP II | LP01 |
| | Cells, fract. A | | |
| HLQA HLQB | Hepatocellular Tumor | Lambda ZAP II | LP01 |
| HHGA HHGB HHGC HHGD | Hemangiopericytoma | Lambda ZAP II | LP01 |
| HSDM | Human Striatum Depression, re-rescue | Lambda ZAP II | LP01 |
| HUSH | H Umbilical Vein Endothelial Cells, | Lambda ZAP II | LP01 |
| | frac A, re-excision | | |
| HSGS | Salivary gland, subtracted | Lambda ZAP II | LP01 |
| HFXA HFXB HFXC HFXD HFXE | Brain frontal cortex | Lambda ZAP II | LP01 |
| HFXF HFXG HFXH | | | |
| HPQA HPQB HPQC | PERM TF274 | Lambda ZAP II | LP01 |
| HFXJ HFXK | Brain Frontal Cortex, re-excision | Lambda ZAP II | LP01 |
| HCWA HCWB HCWC HCWD HCWE | CD34 positive cells (Cord Blood) | ZAP Express | LP02 |
| HCWF HCWG HCWH HCWI HCWJ | | | |
| HCWK | | | |
| HCUA HCUB HCUC | CD34 depleted Buffy Coat (Cord | ZAP Express | LP02 |
| | Blood) | | |
| HRSM | A-14 cell line | ZAP Express | LP02 |
| HRSA | A1-CELL LINE | ZAP Express | LP02 |
| HCUD HCUE HCUF HCUG HCUH | CD34 depleted Buffy Coat (Cord | ZAP Express | LP02 |
| HCUI | Blood), re-excision | | |
| HBXE HBXF HBXG | H. Whole Brain #2, re-excision | ZAP Express | LP02 |
| HRLM | L8 cell line | ZAP Express | LP02 |
| HBXA HBXB HBXC HBXD | Human Whole Brain #2 - Oligo dT > | ZAP Express | LP02 |
| | 1.5 Kb | | |
| HUDA HUDB HUDC | Testes | ZAP Express | LP02 |
| HHTM HHTN HHTO | H. hypothalamus, frac A; re-excision | ZAP Express | LP02 |
| HHTL | H. hypothalamus, frac A | ZAP Express | LP02 |
| HASA HASD | Human Adult Spleen | Uni-ZAP XR | LP03 |
| HFKC HFKD HFKE HFKF HFKG | Human Fetal Kidney | Uni-ZAP XR | LP03 |
| HE8A HE8B HE8C HE8D HE8E HE8F | Human 8 Week Whole Embryo | Uni-ZAP XR | LP03 |
| HE8M HE8N | | | |
| HGBA HGBD HGBE HGBF HGBG | Human Gall Bladder | Uni-ZAP XR | LP03 |
| HGBH HGBI | | | |
| HLHA HLHB HLHC HLHD HLHE | Human Fetal Lung III | Uni-ZAP XR | LP03 |
| HLHF HLHG HLHH HLHQ | | | |
| HPMA HPMB HPMC HPMD HPME | Human Placenta | Uni-ZAP XR | LP03 |
| HPMF HPMG HPMH | | | |
| HPRA HPRB HPRC HPRD | Human Prostate | Uni-ZAP XR | LP03 |
| HSIA HSIC HSID HSIE | Human Adult Small Intestine | Uni-ZAP XR | LP03 |
| HTEA HTEB HTEC HTED HTEE | Human Testes | Uni-ZAP XR | LP03 |
| HTEF HTEG HTEH HTEI HTEJ HTEK | | | |
| HTPA HTPB HTPC HTPD HTPE | Human Pancreas Tumor | Uni-ZAP XR | LP03 |
| HTTA HTTB HTTC HTTD HTTE | Human Testes Tumor | Uni-ZAP XR | LP03 |
| HTTF | | | |
| HAPA HAPB HAPC HAPM | Human Adult Pulmonary | Uni-ZAP XR | LP03 |
| HETA HETB HETC HETD HETE | Human Endometrial Tumor | Uni-ZAP XR | LP03 |
| HETF HETG HETH HETI | | | |
| HHFB HHFC HHFD HHFE HHFF | Human Fetal Heart | Uni-ZAP XR | LP03 |
| HHFG HHFH HHFI | | | |
| HHPB HHPC HHPD HHPE HHPF | Human Hippocampus | Uni-ZAP XR | LP03 |
| HHPG HHPH | | | |
| HCE1 HCE2 HCE3 HCE4 HCE5 HCEB | Human Cerebellum | Uni-ZAP XR | LP03 |
| HCEC HCED HCEE HCEF HCEG | | | |
| HUVB HUVC HUVD HUVE | Human Umbilical Vein, Endo remake | Uni-ZAP XR | LP03 |
| HSTA HSTB HSTC HSTD | Human Skin Tumor | Uni-ZAP XR | LP03 |
| HTAA HTAB HTAC HTAD HTAE | Human Activated T-Cells | Uni-ZAP XR | LP03 |
| HFEA HFEB HFEC | Human Fetal Epithelium (Skin) | Uni-ZAP XR | LP03 |
| HJPA HJPB HJPC HJPD | HUMAN JURKAT MEMBRANE | Uni-ZAP XR | LP03 |
| | BOUND POLYSOMES | | |
| HESA | Human epithelioid sarcoma | Uni-Zap XR | LP03 |
| HLTA HLTB HLTC HLTD HLTE | Human T-Cell Lymphoma | Uni-ZAP XR | LP03 |
| HLTF | | | |
| HFTA HFTB HFTC HFTD | Human Fetal Dura Mater | Uni-ZAP XR | LP03 |
| HRDA HRDB HRDC HRDD HRDE | Human Rhabdomyosarcoma | Uni-ZAP XR | LP03 |
| HRDF | | | |
| HCAA HCAB HCAC | Cem cells cyclohexamide treated | Uni-ZAP XR | LP03 |
| HRGA HRGB HRGC HRGD | Raji Cells, cyclohexamide treated | Uni-ZAP XR | LP03 |
| HSUA HSUB HSUC HSUM | Supt Cells, cyclohexamide treated | Uni-ZAP XR | LP03 |
| HT4A HT4C HT4D | Activated T-Cells, 12 hrs. | Uni-ZAP XR | LP03 |
| HE9A HE9B HE9C HE9D HE9E HE9F | Nine Week Old Early Stage Human | Uni-ZAP XR | LP03 |
| HE9G HE9H HE9M HE9N | | | |
| HATA HATB HATC HATD HATE | Human Adrenal Gland Tumor | Uni-ZAP XR | LP03 |
| HT5A | Activated T-Cells, 24 hrs. | Uni-ZAP XR | LP03 |
| HFGA HFGM | Human Fetal Brain | Uni-ZAP XR | LP03 |
| HNEA HNEB HNEC HNED HNEE | Human Neutrophil | Uni-ZAP XR | LP03 |
| HBGB HBGD | Human Primary Breast Cancer | Uni-ZAP XR | LP03 |
| HBNA HBNB | Human Normal Breast | Uni-ZAP XR | LP03 |
| HCAS | Cem Cells, cyclohexamide treated; | Uni-ZAP XR | LP03 |
| | subtra | | |
| HHPS | Human Hippocampus, subtracted | pBS | LP03 |
| HKCS HKCU | Human Colon Cancer, subtracted | pBS | LP03 |
| HRGS | Raji cells, cyclohexamide treated, | pBS | LP03 |
| | subtracted | | |
| HSUT | Supt cells, cyclohexamide treated, | pBS | LP03 |
| | differentially expressed | | |
| HT4S | Activated T-Cells, 12 hrs, subtracted | Uni-ZAP XR | LP03 |
| HCDA HCDB HCDC HCDD HCDE | Human Chondrosarcoma | Uni-ZAP XR | LP03 |
| HOAA HOAB HOAC | Human Osteosarcoma | Uni-ZAP XR | LP03 |
| HTLA HTLB HTLC HTLD HTLE | Human adult testis, large inserts | Uni-ZAP XR | LP03 |
| HTLF | | | |
| HLMA HLMC HLMD | Breast Lymph node cDNA library | Uni-ZAP XR | LP03 |
| H6EA H6EB H6EC | HL-60, PMA 4H | Uni-ZAP XR | LP03 |
| HTXA HTXB HTXC HTXD HTXE | Activated T-Cell (12 hs)/Thiouridine | Uni-ZAP XR | LP03 |
| HTXF HTXG HTXH | labelledEco | | |
| HNFA HNFB HNFC HNFD HNFE | Human Neutrophil, Activated | Uni-ZAP XR | LP03 |
| HNFF HNFG HNFH HNFJ | | | |
| HTOB HTOC | HUMAN TONSILS, FRACTION 2 | Uni-ZAP XR | LP03 |
| HMGB | Human OB MG63 control fraction I | Uni-ZAP XR | LP03 |
| HOPB | Human OB HOS control fraction I | Uni-ZAP XR | LP03 |
| HORB | Human OB HOS treated (10 nM E2) | Uni-ZAP XR | LP03 |
| | fraction I | | |
| HSVA HSVB HSVC | Human Chronic Synovitis | Uni-ZAP XR | LP03 |
| HROA | HUMAN STOMACH | Uni-ZAP XR | LP03 |
| HBJA HBJB HBJC HBJD HBJE HBJF | HUMAN B CELL LYMPHOMA | Uni-ZAP XR | LP03 |
| HBJG HBJH HBJI HBJJ HBJK | | | |
| HCRA HCRB HCRC | human corpus colosum | Uni-ZAP XR | LP03 |
| HODA HODB HODC HODD | human ovarian cancer | Uni-ZAP XR | LP03 |
| HDSA | Dermatofibrosarcoma Protuberance | Uni-ZAP XR | LP03 |
| HMWA HMWB HMWC HMWD | Bone Marrow Cell Line (RS4; 11) | Uni-ZAP XR | LP03 |
| HMWE HMWF HMWG HMWH | | | |
| HMWI HMWJ | | | |
| HSOA | stomach cancer (human) | Uni-ZAP XR | LP03 |
| HERA | SKIN | Uni-ZAP XR | LP03 |
| HMDA | Brain-medulloblastoma | Uni-ZAP XR | LP03 |
| HGLA HGLB HGLD | Glioblastoma | Uni-ZAP XR | LP03 |
| HEAA | H. Atrophic Endometrium | Uni-ZAP XR | LP03 |
| HBCA HBCB | H. Lymph node breast Cancer | Uni-ZAP XR | LP03 |
| HPWT | Human Prostate BPH, re-excision | Uni-ZAP XR | LP03 |
| HFVG HFVH HFVI | Fetal Liver, subtraction II | pBS | LP03 |
| HNFI | Human Neutrophils, Activated, re- | pBS | LP03 |
| | excision | | |
| HBMB HBMC HBMD | Human Bone Marrow, re-excision | pBS | LP03 |
| HKML HKMM HKMN | H. Kidney Medulla, re-excision | pBS | LP03 |
| HKIX HKIY | H. Kidney Cortex, subtracted | pBS | LP03 |
| HADT | H. Amygdala Depression, subtracted | pBS | LP03 |
| H6AS | HI-60, untreated, subtracted | Uni-ZAP XR | LP03 |
| H6ES | HL-60, PMA 4H, subtracted | Uni-ZAP XR | LP03 |
| H6BS | HL-60, RA 4h, Subtracted | Uni-ZAP XR | LP03 |
| H6CS | HL-60, PMA 1d, subtracted | Uni-ZAP XR | LP03 |
| HTXJ HTXK | Activated T-cell(12 h)/Thiouridine-re- | Uni-ZAP XR | LP03 |
| | excision | | |
| HMSA HMSB HMSC HMSD HMSE | Monocyte activated | Uni-ZAP XR | LP03 |
| HMSF HMSG HMSH HMSI HMSJ | | | |
| HMSK | | | |
| HAGA HAGB HAGC HAGD HAGE | Human Amygdala | Uni-ZAP XR | LP03 |
| HAGF | | | |
| HSRA HSRB HSRE | STROMAL-OSTEOCLASTOMA | Uni-ZAP XR | LP03 |
| HSRD HSRF HSRG HSRH | Human Osteoclastoma Stromal Cells - | Uni-ZAP XR | LP03 |
| | unamplified | | |
| HSQA HSQB HSQC HSQD HSQE | Stromal cell TF274 | Uni-ZAP XR | LP03 |
| HSQF HSQG | | | |
| HSKA HSKB HSKC HSKD HSKE | Smooth muscle, serum treated | Uni-ZAP XR | LP03 |
| HSKF HSKZ | | | |
| HSLA HSLB HSLC HSLD HSLE | Smooth muscle, control | Uni-ZAP XR | LP03 |
| HSLF HSLG | | | |
| HSDA HSDD HSDE HSDF HSDG | Spinal cord | Uni-ZAP XR | LP03 |
| HSDH | | | |
| HPWS | Prostate-BPH subtracted II | pBS | LP03 |
| HSKW HSKX HSKY | Smooth Muscle- HASTE normalized | pBS | LP03 |
| HFPB HFPC HFPD | H. Frontal cortex, epileptic; re-excision | Uni-ZAP XR | LP03 |
| HSDI HSDJ HSDK | Spinal Cord, re-excision | Uni-ZAP XR | LP03 |
| HSKN HSKO | Smooth Muscle Serum Treated, Norm | pBS | LP03 |
| HSKG HSKH HSKI | Smooth muscle, serum induced, re-exc | pBS | LP03 |
| HFCA HFCB HFCC HFCD HFCE | Human Fetal Brain | Uni-ZAP XR | LP04 |
| HFCF | | | |
| HPTA HPTB HPTD | Human Pituitary | Uni-ZAP XR | LP04 |
| HTHB HTHC HTHD | Human Thymus | Uni-ZAP XR | LP04 |
| HE6B HE6C HE6D HE6E HE6F HE6G | Human Whole Six Week Old Embryo | Uni-ZAP XR | LP04 |
| HE6S | | | |
| HSSA HSSB HSSC HSSD HSSE HSSF | Human Synovial Sarcoma | Uni-ZAP XR | LP04 |
| HSSG HSSH HSSI HSSJ HSSK | | | |
| HE7T | 7 Week Old Early Stage Human, | Uni-ZAP XR | LP04 |
| | subtracted | | |
| HEPA HEPB HEPC | Human Epididymus | Uni-ZAP XR | LP04 |
| HSNA HSNB HSNC HSNM HSNN | Human Synovium | Uni-ZAP XR | LP04 |
| HPFB HPFC HPFD HPFE | Human Prostate Cancer, Stage C | Uni-ZAP XR | LP04 |
| | fraction | | |
| HE2A HE2D HE2E HE2H HE2I HE2M | 12 Week Old Early Stage Human | Uni-ZAP XR | LP04 |
| HE2N HE2O | | | |
| HE2B HE2C HE2F HE2G HE2P HE2Q | 12 Week Old Early Stage Human, II | Uni-ZAP XR | LP04 |
| HPTS HPTT HPTU | Human Pituitary, subtracted | Uni-ZAP XR | LP04 |
| HAUA HAUB HAUC | Amniotic Cells - TNF induced | Uni-ZAP XR | LP04 |
| HAQA HAQB HAQC HAQD | Amniotic Cells - Primary Culture | Uni-ZAP XR | LP04 |
| HWTA HWTB HWTC | wilm's tumor | Uni-ZAP XR | LP04 |
| HBSD | Bone Cancer, re-excision | Uni-ZAP XR | LP04 |
| HSGB | Salivary gland, re-excision | Uni-ZAP XR | LP04 |
| HSJA HSJB HSJC | Smooth muscle-ILb induced | Uni-ZAP XR | LP04 |
| HSXA HSXB HSXC HSXD | Human Substantia Nigra | Uni-ZAP XR | LP04 |
| HSHA HSHB HSHC | Smooth muscle, IL1b induced | Uni-ZAP XR | LP04 |
| HOUA HOUB HOUC HOUD HOUE | Adipocytes | Uni-ZAP XR | LP04 |
| HPWA HPWB HPWC HPWD HPWE | Prostate BPH | Uni-ZAP XR | LP04 |
| HELA HELB HELC HELD HELE | Endothelial cells-control | Uni-ZAP XR | LP04 |
| HELF HELG HELH | | | |
| HEMA HEMB HEMC HEMD HEME | Endothelial-induced | Uni-ZAP XR | LP04 |
| HEMF HEMG HEMH | | | |
| HBIA HBIB HBIC | Human Brain, Striatum | Uni-ZAP XR | LP04 |
| HHSA HHSB HHSC HHSD HHSE | Human Hypothalmus, Schizophrenia | Uni-ZAP XR | LP04 |
| HNGA HNGB HNGC HNGD HNGE | neutrophils control | Uni-ZAP XR | LP04 |
| HNGF HNGG HNGH HNGI HNGJ | | | |
| HNHA HNHB HNHC HNHD HNHE | Neutrophils IL-1 and LPS induced | Uni-ZAP XR | LP04 |
| HNHF HNHG HNHH HNHI HNHJ | | | |
| HSDB HSDC | STRIATUM DEPRESSION | Uni-ZAP XR | LP04 |
| HHPT | Hypothalamus | Uni-ZAP XR | LP04 |
| HSAT HSAU HSAV HSAW HSAX | Anergic T-cell | Uni-ZAP XR | LP04 |
| HSAY HSAZ | | | |
| HBMS HBMT HBMU HBMV HBMW | Bone marrow | Uni-ZAP XR | LP04 |
| HBMX | | | |
| HOEA HOEB HOEC HOED HOEE | Osteoblasts | Uni-ZAP XR | LP04 |
| HOEF HOEJ | | | |
| HAIA HAIB HAIC HAID HAIE HAIF | Epithelial-TNFa and INF induced | Uni-ZAP XR | LP04 |
| HTGA HTGB HTGC HTGD | Apoptotic T-cell | Uni-ZAP XR | LP04 |
| HMCA HMCB HMCC HMCD HMCE | Macrophage-oxLDL | Uni-ZAP XR | LP04 |
| HMAA HMAB HMAC HMAD HMAE | Macrophage (GM-CSF treated) | Uni-ZAP XR | LP04 |
| HMAF HMAG | | | |
| HPHA | Normal Prostate | Uni-ZAP XR | LP04 |
| HPIA HPIB HPIC | LNCAP prostate cell line | Uni-ZAP XR | LP04 |
| HPJA HPJB HPJC | PC3 Prostate cell line | Uni-ZAP XR | LP04 |
| HOSE HOSF HOSG | Human Osteoclastoma, re-excision | Uni-ZAP XR | LP04 |
| HTGE HTGF | Apoptotic T-cell, re-excision | Uni-ZAP XR | LP04 |
| HMAJ HMAK | H Macrophage (GM-CSF treated), re- | Uni-ZAP XR | LP04 |
| | excision | | |
| HACB HACC HACD | Human Adipose Tissue, re-excision | Uni-ZAP XR | LP04 |
| HFPA | H. Frontal Cortex, Epileptic | Uni-ZAP XR | LP04 |
| HFAA HFAB HFAC HFAD HFAE | Alzheimer's, spongy change | Uni-ZAP XR | LP04 |
| HFAM | Frontal Lobe, Dementia | Uni-ZAP XR | LP04 |
| HMIA HMIB HMIC | Human Manic Depression Tissue | Uni-ZAP XR | LP04 |
| HTSA HTSE HTSF HTSG HTSH | Human Thymus | pBS | LP05 |
| HPBA HPBB HPBC HPBD HPBE | Human Pineal Gland | pBS | LP05 |
| HSAA HSAB HSAC | HSA 172 Cells | pBS | LP05 |
| HSBA HSBB HSBC HSBM | HSC172 cells | pBS | LP05 |
| HJAA HJAB HJAC HJAD | Jurkat T-cell G1 phase | pBS | LP05 |
| HJBA HJBB HJBC HJBD | Jurkat T-Cell, S phase | pBS | LP05 |
| HAFA HAFB | Aorta endothelial cells + TNF-a | pBS | LP05 |
| HAWA HAWB HAWC | Human White Adipose | pBS | LP05 |
| HTNA HTNB | Human Thyroid | pBS | LP05 |
| HONA | Normal Ovary, Premenopausal | pBS | LP05 |
| HARA HARB | Human Adult Retina | pBS | LP05 |
| HLJA HLJB | Human Lung | pCMVSport 1 | LP06 |
| HOFM HOFN HOFO | H. Ovarian Tumor, II, OV5232 | pCMVSport 2.0 | LP07 |
| HOGA HOGB HOGC | OV 10-3-95 | pCMVSport 2.0 | LP07 |
| HCGL | CD34 + cells, II | pCMVSport 2.0 | LP07 |
| HDLA | Hodgkin's Lymphoma I | pCMVSport 2.0 | LP07 |
| HDTA HDTB HDTC HDTD HDTE | Hodgkin's Lymphoma II | pCMVSport 2.0 | LP07 |
| HKAA HKAB HKAC HKAD HKAE | Keratinocyte | pCMVSport2.0 | LP07 |
| HKAF HKAG HKAH | | | |
| HCIM | CAPFINDER, Crohn's Disease, lib 2 | pCMVSport 2.0 | LP07 |
| HKAL | Keratinocyte, lib 2 | pCMVSport2.0 | LP07 |
| HKAT | Keratinocyte, lib 3 | pCMVSport2.0 | LP07 |
| HNDA | Nasal polyps | pCMVSport2.0 | LP07 |
| HDRA | H. Primary Dendritic Cells,lib 3 | pCMVSport2.0 | LP07 |
| HOHA HOHB HOHC | Human Osteoblasts II | pCMVSport2.0 | LP07 |
| HLDA HLDB HLDC | Liver, Hepatoma | pCMVSport3.0 | LP08 |
| HLDN HLDO HLDP | Human Liver, normal | pCMVSport3.0 | LP08 |
| HMTA | pBMC stimulated w/poly I/C | pCMVSport3.0 | LP08 |
| HNTA | NTERA2, control | pCMVSport3.0 | LP08 |
| HDPA HDPB HDPC HDPD HDPF | Primary Dendritic Cells, lib 1 | pCMVSport3.0 | LP08 |
| HDPG HDPH HDPI HDPJ HDPK | | | |
| HDPM HDPN HDPO HDPP | Primary Dendritic cells, frac 2 | pCMVSporr3.0 | LP08 |
| HMUA HMUB HMUC | Myoloid Progenitor Cell Line | pCMVSport3.0 | LP08 |
| HHEA HHEB HHEC HHED | T Cell helper I | pCMVSport3.0 | LP08 |
| HHEM HHEN HHEO HHEP | T cell helper II | pCMVSport3.0 | LP08 |
| HEQA HEQB HEQC | Human endometrial stromal cells | pCMVSport3.0 | LP08 |
| HJMA HJMB | Human endometrial stromal cells- | pCMVSport3.0 | LP08 |
| | treated with progesterone | | |
| HSWA HSWB HSWC | Human endometrial stromal cells- | pCMVSport3.0 | LP08 |
| | treated with estradiol | | |
| HSYA HSYB HSYC | Human Thymus Stromal Cells | pCMVSport3.0 | LP08 |
| HLWA HLWB HLWC | Human Placenta | pCMVSport3.0 | LP08 |
| HRAA HRAB HRAC | Rejected Kidney, lib 4 | pCMVSport3.0 | LP08 |
| HMTM | PCR, pBMC I/C treated | PCRII | LP09 |
| HMJA | H. Meniingima, M6 | pSport 1 | LP10 |
| HMKA HMKB HMKC HMKD HMKE | H. Meningima, M1 | pSport 1 | LP10 |
| HUSG HUSI | Human umbilical vein endothelial cells, | pSport 1 | LP10 |
| | IL-4 induced | | |
| HUSX HUSY | Human Umbilical Vein Endothelial | pSport 1 | LP10 |
| | Cells, uninduced | | |
| HOFA | Ovarian Tumor I, OV5232 | pSport 1 | LP10 |
| HCFA HCFB HCFC HCFD | T-Cell PHA 16 hrs | pSport 1 | LP10 |
| HCFL HCFM HCFN HCFO | T-Cell PHA 24 hrs | pSport 1 | LP10 |
| HADA HADC HADD HADE HADF | Human Adipose | pSport 1 | LP10 |
| HADG | | | |
| HOVA HOVB HOVC | Human Ovary | pSport 1 | LP10 |
| HTWB HTWC HTWD HTWE HTWF | Resting T-Cell Library, II | pSport 1 | LP10 |
| HMMA | Spleen metastic melanoma | pSport 1 | LP10 |
| HLYA HLYB HLYC HLYD HLYE | Spleen, Chronic lymphocytic leukemia | pSport 1 | LP10 |
| HCGA | CD34 + cell, I | pSport 1 | LP10 |
| HEOM HEON | Human Eosinophils | pSport 1 | LP10 |
| HTDA | Human Tonsil, Lib 3 | pSport 1 | LP10 |
| HSPA | Salivary Gland, Lib 2 | pSport 1 | LP10 |
| HCHA HCHB HCHC | Breast Cancer cell line, MDA 36 | pSport 1 | LP10 |
| HCHM HCHN | Breast Cancer Cell line, angiogenic | pSport 1 | LP10 |
| HCIA | Crohn's Disease | pSport 1 | LP10 |
| HDAA HDAB HDAC | HEL cell line | pSport 1 | LP10 |
| HABA | Human Astrocyte | pSport 1 | LP10 |
| HUFA HUFB HUFC | Ulcerative Colitis | pSport 1 | LP10 |
| HNTM | NTERA2 + retinoic acid, 14 days | pSport 1 | LP10 |
| HDQA | Primary Dendritic cells, CapFinder2, | pSport 1 | LP10 |
| | frac 1 | | |
| HDQM | Primary Dendritic Cells, CapFinder, | pSport 1 | LP10 |
| | frac 2 | | |
| HLDX | Human Liver, normal, CapFinder | pSport 1 | LP10 |
| HULA HULB HULC | Human Dermal Endothelial | pSport 1 | LP10 |
| | Cells, untreated | | |
| HUMA | Human Dermal Endothelial cells, treated | pSport 1 | LP10 |
| HCJA | Human Stromal Endometrial | pSport 1 | LP10 |
| | fibroblasts, untreated | | |
| HCJM | Human Stromal endometrial fibroblasts, | pSport 1 | LP10 |
| | treated w/estradiol | | |
| HEDA | Human Stromal endometrial fibroblasts, | pSport 1 | LP10 |
| | treated with progesterone | | |
| HFNA | Human ovary tumor cell OV350721 | pSport 1 | LP10 |
| HKGA HKGB HKGC HKGD | Merkel Cells | pSport 1 | LP10 |
| HISA HISB HISC | Pancreas Islet Cell Tumor | pSport 1 | LP10 |
| HLSA | Skin, burned | pSport 1 | LP10 |
| HBZA | Prostate, BPH, Lib 2 | pSport 1 | LP10 |
| HBZS | Prostate BPH, Lib 2, subtracted | pSport 1 | LP10 |
| HFIA HFIB HFIC | Synovial Fibroblasts (control) | pSport 1 | LP10 |
| HFIH HFII HFIJ | Synovial hypoxia | pSport 1 | LP10 |
| HFIT HFIU HFIV | Synovial IL-1/TNF stimulated | pSport 1 | LP10 |
| HGCA | Messangial cell, frac 1 | pSport 1 | LP10 |
| HMVA HMVB HMVC | Bone Marrow Stromal Cell, untreated | pSport 1 | LP10 |
| HFIX HFIY HFIZ | Synovial Fibroblasts (III/TNF), subt | pSport 1 | LP10 |
| HFOX HFOY HFOZ | Synovial hypoxia-RSF subtracted | pSport 1 | LP10 |
| HMQA HMQB HMQC HMQD | Human Activated Monocytes | Uni-ZAP XR | LP11 |
| HLIA HLIB HLIC | Human Liver | pCMVSport 1 | LP012 |
| HHBA HHBB HHBC HHBD HHBE | Human Heart | pCMVSport 1 | LP012 |
| HBBA HBBB | Human Brain | pCMVSport 1 | LP012 |
| HLJA HLJB HUJC HLJD HLJE | Human Lung | pCMVSport 1 | LP012 |
| HOGA HOGB HOGC | Ovarian Tumor | pCMVSport 2.0 | LP012 |
| HTJM | Human Tonsils, Lib 2 | pCMVSport 2.0 | LP012 |
| HAMF HAMG | KMH2 | pCMVSport 3.0 | LP012 |
| HAJA HAJB HAJC | L428 | pCMVSport 3.0 | LP012 |
| HWBA HWBB HWBC HWBD HWBE | Dendritic cells, pooled | pCMVSport 3.0 | LP012 |
| HWAA HWAB HWAC HWAD HWAE | Human Bone Marrow, treated | pCMVSport 3.0 | LP012 |
| HYAA HYAB HYAC | B Cell lymphoma | pCMVSport 3.0 | LP012 |
| HWHG HWHH HWHI | Healing groin wound, 6.5 hours post | pCMVSport 3.0 | LP012 |
| | incision | | |
| HWHP HWHQ HWHR | Healing groin wound; 7.5 hours post | pCMVSport 3.0 | LP012 |
| | incision | | |
| HARM | Healing groin wound - zero hr post- | pCMVSport 3.0 | LP012 |
| | incision (control) | | |
| HBIM | Olfactory epithelium; nasalcavity | pCMVSport 3.0 | LP012 |
| HWDA | Healing Abdomen wound; 70&90 min | pCMVSport 3.0 | LP012 |
| | post incision | | |
| HWEA | Healing Abdomen Wound; 15 days post | pCMVSport 3.0 | LP012 |
| | incision | | |
| HWJA | Healing Abdomen Wound; 21&29 days | pCMVSport 3.0 | LP012 |
| HNAL | Human Tongue, frac 2 | pSport1 | LP012 |
| HMJA | H. Meniingima, M6 | pSport1 | LP012 |
| HMKA HMKB HMKC HMKD HMKE | H. Meningima, M1 | pSport1 | LP012 |
| HOFA | Ovarian Tumor I, OV5232 | pSport1 | LP012 |
| HCFA HCFB HCFC HCFD | T-Cell PHA 16 hrs | pSport1 | LP012 |
| HCFL HCFM HCFN HCFO | T-Cell PHA 24 hrs | pSport1 | LP012 |
| HMMA HMMB HMMC | Spleen metastic melanoma | pSport1 | LP012 |
| HTDA | Human Tonsil, Lib 3 | pSport1 | LP012 |
| HDBA | Human Fetal Thymus | pSport1 | LP012 |
| HDUA | Pericardium | pSport1 | LP012 |
| HBZA | Prostate, BPH, Lib 2 | pSport1 | LP012 |
| HWCA | Larynx tumor | pSport1 | LP012 |
| HWKA | Normal lung | pSport1 | LP012 |
| HSMB | Bone marrow stroma, treated | pSport1 | LP012 |
| HBHM | Normal trachea | pSport1 | LP012 |
| HLFC | Human Larynx | pSport1 | LP012 |
| HLRB | Siebben Polyposis | pSport1 | LP012 |
| HNIA | Mammary Gland | pSport1 | LP012 |
| HNJB | Palate carcinoma | pSport1 | LP012 |
| HNKA | Palate normal | pSport1 | LP012 |
| HMZA | Pharynx carcinoma | pSport1 | LP012 |
| HABG | Cheek Carcinoma | pSport1 | LP012 |
| HMZM | Pharynx Carcinoma | pSport1 | LP012 |
| HDRM | Larynx Carcinoma | pSport1 | LP012 |
| HVAA | Pancreas normal PCA4 No | pSport1 | LP012 |
| HICA | Tongue carcinoma | pSport1 | LP012 |
| HUKA HUKB HUKC HUKD HUKE | Human Uterine Cancer | Lambda ZAP II | LP013 |
| HFFA | Human Fetal Brain, random primed | Lambda ZAP II | LP013 |
| HTUA | Activated T-cell labeled with 4-thioluri | Lambda ZAP II | LP013 |
| HBQA | Early Stage Human Brain, random | Lambda ZAP II | LP013 |
| | primed | | |
| HMEB | Human microvascular Endothelial cells, | Lambda ZAP II | LP013 |
| | fract. B | | |
| HUSH | Human Umbilical Vein Endothelial | Lambda ZAP II | LP013 |
| | cells, fract. A, re-excision | | |
| HLQC HLQD | Hepatocellular tumor, re-excision | Lambda ZAP II | LP013 |
| HTWJ HTWK HTWL | Resting T-cell, re-excision | Lambda ZAP II | LP013 |
| HF6S | Human Whole 6 week Old Embryo (II), | pBluescript | LP013 |
| | subt | | |
| HHPS | Human Hippocampus, subtracted | pBluescript | LP013 |
| HL1S | LNCAP, differential expression | pBluescript | LP013 |
| HLHS HLHT | Early Stage Human Lung, Subtracted | pBluescript | LP013 |
| HSUS | Supt cells, cyclohexamide treated, | pBluescript | LP013 |
| | subtracted | | |
| HSUT | Supt cells, cyclohexamide treated, | pBluescript | LP013 |
| | differentially expressed | | |
| HSDS | H. Striatum Depression, subtracted | pBluescript | LP013 |
| HPTZ | Human Pituitary, Subtracted VII | pBluescript | LP013 |
| HSDX | H. Striatum Depression, subt II | pBluescript | LP013 |
| HSDZ | H. Striatum Depression, subt | pBluescript | LP013 |
| HPBA HPBB HPBC HPBD HPBE | Human Pineal Gland | pBluescript SK- | LP013 |
| HRTA | Colorectal Tumor | pBluescript SK- | LP013 |
| HSBA HSBB HSBC HSBM | HSC172 cells | pBluescript SK- | LP013 |
| HJAA HJAB HJAC HJAD | Jurkat T-cell G1 phase | pBluescript SK- | LP013 |
| HJBA HJBB HJBC HJBD | Jurkat T-cell, S1 phase | pBluescript SK- | LP013 |
| HTNA HTNB | Human Thyroid | pBluescript SK- | LP013 |
| HAHA HAHB | Human Adult Heart | Uni-ZAP XR | LP013 |
| HE6A | Whole 6 week Old Embryo | Uni-ZAP XR | LP013 |
| HFCA HFCB HFCC HFCD HFCE | Human Fetal Brain | Uni-ZAP XR | LP013 |
| HFKC HFKD HFKE HFKF HFKG | Human Fetal Kidney | Uni-ZAP XR | LP013 |
| HGBA HGBD HGBE HGBF HGBG | Human Gall Bladder | Uni-ZAP XR | LP013 |
| HPRA HPRB HPRC HPRD | Human Prostate | Uni-ZAP XR | LP013 |
| HTEA HTEB HTEC HTED HTEE | Human Testes | Uni-ZAP XR | LP013 |
| HTTA HTTB HTTC HTTD HTTE | Human Testes Tumor | Uni-ZAP XR | LP013 |
| HYBA HYBB | Human Fetal Bone | Uni-ZAP XR | LP013 |
| HFLA | Human Fetal Liver | Uni-ZAP XR | LP013 |
| HHFB HHFC HHFD HHFE HHFF | Human Fetal Heart | Uni-ZAP XR | LP013 |
| HUVB HUVC HUVD HUVE | Human Umbilical Vein, End. remake | Uni-ZAP XR | LP013 |
| HTHB HTHC HTHD | Human Thymus | Uni-ZAP XR | LP013 |
| HSTA HSTB HSTC HSTD | Human Skin Tumor | Uni-ZAP XR | LP013 |
| HTAA HTAB HTAC HTAD HTAE | Human Activated T-cells | Uni-ZAP XR | LP013 |
| HFEA HFEB HFEC | Human Fetal Epithelium (skin) | Uni-ZAP XR | LP013 |
| HJPA HJPB HJPC HJPD | Human Jurkat Membrane Bound | Uni-ZAP XR | LP013 |
| | Polysomes | | |
| HESA | Human Epithelioid Sarcoma | Uni-ZAP XR | LP013 |
| HALS | Human Adult Liver, Subtracted | Uni-ZAP XR | LP013 |
| HFTA HFTB HFTC HFTD | Human Fetal Dura Mater | Uni-ZAP XR | LP013 |
| HCAA HCAB HCAC | Cem cells, cyclohexamide treated | Uni-ZAP XR | LP013 |
| HRGA HRGB HRGC HRGD | Raji Cells, cyclohexamide treated | Uni-ZAP XR | LP013 |
| HE9A HE9B HE9C HE9D HE9E | Nine Week Old Early Stage Human | Uni-ZAP XR | LP013 |
| HSFA | Human Fibrosarcoma | Uni-ZAP XR | LP013 |
| HATA HATB HATC HATD HATE | Human Adrenal Gland Tumor | Uni-ZAP XR | LP013 |
| HTRA | Human Trachea Tumor | Uni-ZAP XR | LP013 |
| HE2A HE2D HE2E HE2H HE2I | 12 Week Old Early Stage Human | Uni-ZAP XR | LP013 |
| HE2B HE2C HE2F HE2G HE2P | 12 Week Old Early Stage Human, II | Uni-ZAP XR | LP013 |
| HNEA HNEB HNEC HNED HNEE | Human Neutrophil | Uni-ZAP XR | LP013 |
| HBGA | Human Primary Breast Cancer | Uni-ZAP XR | LP013 |
| HPTS HPTT HPTU | Human Pituitary, subtracted | Uni-ZAP XR | LP013 |
| HMQA HMQB HMQC HMQD | Human Activated Monocytes | Uni-ZAP XR | LP013 |
| HOAA HOAB HOAC | Human Osteosarcoma | Uni-ZAP XR | LP013 |
| HTOA HTOD HTOE HTOF HTOG | human tonsils | Uni-ZAP XR | LP013 |
| HMGB | Human OB MG63 control fraction I | Uni-ZAP XR | LP013 |
| HOPB | Human OB HOS control fraction I | Uni-ZAP XR | LP013 |
| HOQB | Human OB HOS treated (1 nM E2) | Uni-ZAP XR | LP013 |
| | fraction I | | |
| HAUA HAUB HAUC | Amniotic Cells - TNF induced | Uni-ZAP XR | LP013 |
| HAQA HAQB HAQC HAQD | Amniotic Cells - Primary Culture | Uni-ZAP XR | LP013 |
| HROA HROC | HUMAN STOMACH | Uni-ZAP XR | LP013 |
| HBJA HBJB HBJC HBJD HBJE | HUMAN B CELL LYMPHOMA | Uni-ZAP XR | LP013 |
| HODA HODB HODC HODD | human ovarian cancer | Uni-ZAP XR | LP013 |
| HCPA | Corpus Callosum | Uni-ZAP XR | LP013 |
| HSOA | stomach cancer (human) | Uni-ZAP XR | LP013 |
| HERA | SKIN | Uni-ZAP XR | LP013 |
| HMDA | Brain-medulloblastoma | Uni-ZAP XR | LP013 |
| HGLA HGLB HGLD | Glioblastoma | Uni-ZAP XR | LP013 |
| HWTA HWTB HWTC | wilm's tumor | Uni-ZAP XR | LP013 |
| HEAA | H. Atrophic Endometrium | Uni-ZAP XR | LP013 |
| HAPN HAPO HAPP HAPQ HAPR | Human Adult Pulmonary; re-excision | Uni-ZAP XR | LP013 |
| HLTG HLTH | Human T-cell lymphoma; re-excision | Uni-ZAP XR | LP013 |
| HAHC HAHD HAHE | Human Adult Heart; re-excision | Uni-ZAP XR | LP013 |
| HAGA HAGB HAGC HAGD HAGE | Human Amygdala | Uni-ZAP XR | LP013 |
| HSJA HSJB HSJC | Smooth muscle-ILb induced | Uni-ZAP XR | LP013 |
| HSHA HSHB HSHC | Smooth muscle, IL1b induced | Uni-ZAP XR | LP013 |
| HPWA HPWB HPWC HPWD HPWE | Prostate BPH | Uni-ZAP XR | LP013 |
| HPIA HPIB HPIC | LNCAP prostate cell line | Uni-ZAP XR | LP013 |
| HPJA HPJB HPJC | PC3 Prostate cell line | Uni-ZAP XR | LP013 |
| HBTA | Bone Marrow Stroma, TNF&LPS ind | Uni-ZAP XR | LP013 |
| HMCF HMCG HMCH HMCI HMCJ | Macrophage-oxLDL; re-excision | Uni-ZAP XR | LP013 |
| HAGG HAGH HAGI | Human Amygdala; re-excision | Uni-ZAP XR | LP013 |
| HACA | H. Adipose Tissue | Uni-ZAP XR | LP013 |
| HKFB | K562 + PMA (36 hrs), re-excision | ZAP Express | LP013 |
| HCWT HCWU HCWV | CD34 positive cells (cord blood), re-ex | ZAP Express | LP013 |
| HBWA | Whole brain | ZAP Express | LP013 |
| HBXA HBXB HBXC HBXD | Human Whole Brain #2 - Oligo dT > | ZAP Express | LP013 |
| | 1.5 Kb | | |
| HAVM | Temporal cortex-Alzheizmer | pT-Adv | LP014 |
| HAVT | Hippocampus, Alzheimer Subtracted | pT-Adv | LP014 |
| HHAS | CHME Cell Line | Uni-ZAP XR | LP014 |
| HAJR | Larynx normal | pSport 1 | LP014 |
| HWLE HWLF HWLG HWLH | Colon Normal | pSport 1 | LP014 |
| HCRM HCRN HCRO | Colon Carcinoma | pSport 1 | LP014 |
| HWLI HWLJ HWLK | Colon Normal | pSport 1 | LP014 |
| HWLQ HWLR HWLS HWLT | Colon Tumor | pSport I | LP014 |
| HBFM | Gastrocnemius Muscle | pSport 1 | LP014 |
| HBOD HBOE | Quadriceps Muscle | pSport 1 | LP014 |
| HBKD HBKE | Soleus Muscle | pSport 1 | LP014 |
| HCCM | Pancreatic Langerhans | pSport 1 | LP014 |
| HWGA | Larynx carcinoma | pSport 1 | LP014 |
| HWGM HWGN | Larynx carcinoma | pSport 1 | LP014 |
| HWLA HWLB HWLC | Normal colon | pSport 1 | LP014 |
| HWLM HWLN | Colon Tumor | pSport 1 | LP014 |
| HVAM HVAN HVAO | Pancreas Tumor | pSport 1 | LP014 |
| HWGQ | Larynx carcinoma | pSport 1 | LP014 |
| HAQM HAQN | Salivary Gland | pSport 1 | LP014 |
| HASM | Stomach; normal | pSport 1 | LP014 |
| HBCM | Uterus; normal | pSport 1 | LP014 |
| HCDM | Testis; normal | pSport 1 | LP014 |
| HDJM | Brain; normal | pSport 1 | LP014 |
| HEFM | Adrenal Gland, normal | pSport 1 | LP014 |
| HBAA | Rectum normal | pSport 1 | LP014 |
| HFDM | Rectum tumour | pSport 1 | LP014 |
| HGAM | Colon, normal | pSport 1 | LP014 |
| HHMM | Colon, tumour | pSport 1 | LP014 |
| HCLB HCLC | Human Lung Cancer | Lambda Zap II | LP015 |
| HRLA | L1 Cell line | ZAP Express | LP015 |
| HHAM | Hypothalamus, Alzheimer's | pCMVSport 3.0 | LP015 |
| HKBA | Ku 812F Basophils Line | pSport 1 | LP015 |
| HS2S | Saos2, Dexamethosome Treated | pSport 1 | LP016 |
| HA5A | Lung Carcinoma A549 TNFalpha | pSport 1 | LP016 |
| | activated | | |
| HTFM | TF-1 Cell Line GM-CSF Treated | pSport 1 | LP016 |
| HYAS | Thyroid Tumour | pSport 1 | LP016 |
| HUTS | Larynx Normal | pSport 1 | LP016 |
| HXOA | Larynx Tumor | pSport 1 | LP016 |
| HEAH | Ea.hy.926 cell line | pSport 1 | LP016 |
| HINA | Adenocarcinoma Human | pSport 1 | LP016 |
| HRMA | Lung Mesothelium | pSport 1 | LP016 |
| HLCL | Human Pre-Differentiated Adipocytes | Uni-Zap XR | LP017 |
| HS2A | Saos2 Cells | pSport 1 | LP020 |
| HS2I | Saos2 Cells; Vitamin D3 Treated | pSport 1 | LP020 |
| HUCM | CHME Cell Line, untreated | pSport 1 | LP020 |
| HEPN | Aryepiglottis Normal | pSport 1 | LP020 |
| HPSN | Sinus Piniformis Tumour | pSport 1 | LP020 |
| HNSA | Stomach Normal | pSport 1 | LP020 |
| HNSM | Stomach Tumour | pSport 1 | LP020 |
| HNLA | Liver Normal Met5No | pSport 1 | LP020 |
| HUTA | Liver Tumour Met 5 Tu | pSport 1 | LP020 |
| HOCN | Colon Normal | pSport 1 | LP020 |
| HOCT | Colon Tumor | pSport 1 | LP020 |
| HTNT | Tongue Tumour | pSport 1 | LP020 |
| HLXN | Larynx Normal | pSport 1 | LP020 |
| HLXT | Larynx Tumour | pSport 1 | LP020 |
| HTYN | Thymus | pSport 1 | LP020 |
| HPLN | Placenta | pSport 1 | LP020 |
| HTNG | Tongue Normal | pSport 1 | LP020 |
| HZAA | Thyroid Normal (SDCA2 No) | pSport 1 | LP020 |
| HWES | Thyroid Thyroiditis | pSport 1 | LP020 |
| HFHD | Ficolled Human Stromal Cells, 5Fu | pTrip1Ex2 | LP021 |
| | treated | | |
| HFHM, HFHN | Ficolled Human Stromal Cells, | pTrip1Ex2 | LP021 |
| | Untreated | | |
| HPCI | Hep G2 Cells, lambda library | lambda Zap-CMV XR | LP021 |
| HBCA, HBCB, HBCC | H. Lymph node breast Cancer | Uni-ZAP XR | LP021 |
| HCOK | Chondrocytes | pSPORT1 | LP022 |
| HDCA, HDCB, HDCC | Dendritic Cells From CD34 Cells | pSPORT1 | LP022 |
| HDMA, HDMB | CD40 activated monocyte dendritic | pSPORT1 | LP022 |
| | cells | | |
| HDDM, HDDN, HDDO | LPS activated derived dendritic cells | pSPORT1 | LP022 |
| HPCR | Hep G2 Cells, PCR library | lambda Zap-CMV XR | LP022 |
| HAAA, HAAB, HAAC | Lung, Cancer (4005313A3): Invasive | pSPORT1 | LP022 |
| | Poorly Differentiated Lung | | |
| | Adenocarcinoma | | |
| HIPA, HIPB, HIPC | Lung, Cancer (4005163 B7): Invasive, | pSPORT1 | LP022 |
| | Poorly Diff. Adenocarcinoma, | | |
| | Metastatic | | |
| HOOH, HOOI | Ovary, Cancer: (4004562 B6) Papillary | pSPORT1 | LP022 |
| | Serous Cystic Neoplasm, Low | | |
| | Malignant Pot | | |
| HIDA | Lung, Normal: (4005313 B1) | pSPORT1 | LP022 |
| HUJA, HUJB, HUJC, HUJD, HUJE | B-Cells | pCMVSport 3.0 | LP022 |
| HNOA, HNOB, HNOC, HNOD | Ovary, Normal: (9805C040R) | pSPORT1 | LP022 |
| HNLM | Lung, Normal: (4005313 B1) | pSPORT1 | LP022 |
| HSCL | Stromal Cells | pSPORT1 | LP022 |
| HAAX | Lung, Cancer: (4005313 A3) Invasive | pSPORT1 | LP022 |
| | Poorly-differentiated Metastatic lung | | |
| | adenocarcinoma | | |
| HUUA, HUUB, HUUC, HUUD | B-cells (unstimulated) | pTrip1Ex2 | LP022 |
| HWWA, HWWB, HWWC, HWWD, HW | B-cells (stimulated) | pSPORT1 | LP022 |
| WE, HWWF, HWWG | | | |
| HCCC | Colon, Cancer: (9808C064R) | pCMVSport 3.0 | LP023 |
| HPDO HPDP HPDQ HPDR HPD | Ovary, Cancer (9809C332): Poorly | pSport 1 | LP023 |
| | differentiated adenocarcinoma | | |
| HPCO HPCP HPCQ HPCT | Ovary, Cancer (15395A1F): Grade II | pSport 1 | LP023 |
| | Papillary Carcinoma | | |
| HOCM HOCO HOCP HOCQ | Ovary, Cancer: (15799A1F) Poorly | pSport 1 | LP023 |
| | differentiated carcinoma | | |
| HCBM HCBN HCBO | Breast, Cancer: (4004943 A5) | pSport 1 | LP023 |
| HNBT HNBU HNBV | Breast, Normal: (4005522B2) | pSport 1 | LP023 |
| HBCP HBCQ | Breast, Cancer: (4005522 A2) | pSport 1 | LP023 |
| HBCJ | Breast, Cancer: (9806C012R) | pSport 1 | LP023 |
| HSAM HSAN | Stromal cells 3.88 | pSport 1 | LP023 |
| HVCA HVCB HVCC HVCD | Ovary, Cancer: (4004332 A2) | pSport 1 | LP023 |
| HSCK HSEN HSEO | Stromal cells (HBM3.18) | pSport 1 | LP023 |
| HSCP HSCQ | stromal cell clone 2.5 | pSport 1 | LP023 |
| HUXA | Breast Cancer: (4005385 A2) | pSport 1 | LP023 |
| HCOM HCON HCOO HCOP HCOQ | Ovary, Cancer (4004650 A3): Well- | pSport 1 | LP023 |
| | Differentiated Micropapillary Serous | | |
| | Carcinoma | | |
| HBNM | Breast, Cancer: (9802C020E) | pSport 1 | LP023 |
| HVVA HVVB HVVC HVVD HVVE | Human Bone Marrow, treated | pSport 1 | LP023 |

[0920] Particularly, a specific polynucleotide with 30-40 nucleotides is synthesized using an Applied Biosystems DNA synthesizer according to the sequence reported. The oligonucleotide is labeled, for instance, with ³²P-γ-ATP using T4 polynucleotide kinase and purified according to routine methods. (E.g., Maniatis et al., Molecular Cloning: A Laboratory Manual, Cold Spring Harbor Press, Cold Spring, N.Y. (1982).) The plasmid mixture is transformed into a suitable host, as indicated above (such as XL-1 Blue (Stratagene)) using techniques known to those of skill in the art, such as those provided by the vector supplier or in related publications or patents cited above. The transformants are plated on 1.5% agar plates (containing the appropriate selection agent, e.g., ampicillin) to a density of about 150 transformants (colonies) per plate. These plates are screened using Nylon membranes according to routine methods for bacterial colony screening (e.g., Sambrook et al., Molecular Cloning: A Laboratory Manual, 2nd Edit., (1989), Cold Spring Harbor Laboratory Press, pages 1.93 to 1.104), or other techniques known to those of skill in the art.

[0921] Alternatively, two primers of 17-20 nucleotides derived from both ends of the nucleotide sequence of SEQ ID NO:X are synthesized and used to amplify the desired cDNA using the deposited cDNA plasmid as a template. The polymerase chain reaction is carried out under routine conditions, for instance, in 25 μl of reaction mixture with 0.5 μg of the above cDNA template. A convenient reaction mixture is 1.5-5 mM MgCl₂, 0.01% (w/v) gelatin, 20 μM each of dATP, dCTP, dGTP, dTTP, 25 pmol of each primer and 0.25 Unit of Taq polymerase. Thirty five cycles of PCR (denaturation at 94° C. for 1 min; annealing at 55° C. for 1 min; elongation at 72° C. for 1 min) are performed with a Perkin-Elmer Cetus automated thermal cycler. The amplified product is analyzed by agarose gel electrophoresis and the DNA band with expected molecular weight is excised and purified. The PCR product is verified to be the selected sequence by subcloning and sequencing the DNA product.

[0922] Several methods are available for the identification of the 5′ or 3′ non-coding portions of a gene which may not be present in the deposited clone. These methods include but are not limited to, filter probing, clone enrichment using specific probes, and protocols similar or identical to 5′ and 3′ “RACE” protocols which are well known in the art. For instance, a method similar to 5′ RACE is available for generating the missing 5′ end of a desired full-length transcript. (Fromont-Racine et al., Nucleic Acids Res. 21(7):1683-1684 (1993).)

[0923] Briefly, a specific RNA oligonucleotide is ligated to the 5′ ends of a population of RNA presumably containing full-length gene RNA transcripts. A primer set containing a primer specific to the ligated RNA oligonucleotide and a primer specific to a known sequence of the gene of interest is used to PCR amplify the 5′ portion of the desired full-length gene. This amplified product may then be sequenced and used to generate the full length gene.

[0924] This above method starts with total RNA isolated from the desired source, although poly-A+ RNA can be used. The RNA preparation can then be treated with phosphatase if necessary to eliminate 5′ phosphate groups on degraded or damaged RNA which may interfere with the later RNA ligase step. The phosphatase should then be inactivated and the RNA treated with tobacco acid pyrophosphatase in order to remove the cap structure present at the 5′ ends of messenger RNAs. This reaction leaves a 5′ phosphate group at the 5′ end of the cap cleaved RNA which can then be ligated to an RNA oligonucleotide using T4 RNA ligase.

[0925] This modified RNA preparation is used as a template for first strand cDNA synthesis using a gene specific oligonucleotide. The first strand synthesis reaction is used as a template for PCR amplification of the desired 5′ end using a primer specific to the ligated RNA oligonucleotide and a primer specific to the known sequence of the gene of interest. The resultant product is then sequenced and analyzed to confirm that the 5′ end sequence belongs to the desired gene.

### Example 2

[0926] Isolation of Genomic Clones Corresponding to a Polynucleotide

[0927] A human genomic P1 library (Genomic Systems, Inc.) is screened by PCR using primers selected for the sequence corresponding to SEQ ID NO:X according to the method described in Example 1. (See also, Sambrook et al., Molecular Cloning: A Laboratory Manual, 2nd Edn., (1989), Cold Spring Harbor Laboratory Press).

### Example 3

[0928] Tissue specific expression analysis

[0929] The Human Genome Sciences, Inc. (HGS) database is derived from sequencing tissue and/or disease specific cDNA libraries. Libraries generated from a particular tissue are selected and the specific tissue expression pattern of EST groups or assembled contigs within these libraries is determined by comparison of the expression patterns of those groups or contigs within the entire database. ESTs and assembled contigs which show tissue specific expression are selected.

[0930] The original clone from which the specific EST sequence was generated, or in the case of an assembled contig, the clone from which the 5′ most EST sequence was generated, is obtained from the catalogued library of clones and the insert amplified by PCR using methods known in the art. The PCR product is denatured and then transferred in 96 or 384 well format to a nylon membrane (Schleicher and Scheull) generating an array filter of tissue specific clones. Housekeeping genes, maize genes, and known tissue specific genes are included on the filters. These targets can be used in signal normalization and to validate assay sensitivity. Additional targets are included to monitor probe length and specificity of hybridization.

[0931] Radioactively labeled hybridization probes are generated by first strand cDNA synthesis per the manufacturer's instructions (Life Technologies) from mRNA/RNA samples prepared from the specific tissue being analyzed (e.g., colon, colon cancer, etc.). The hybridization probes are purified by gel exclusion chromatography, quantitated, and hybridized with the array filters in hybridization bottles at 65° C. overnight. The filters are washed under stringent conditions and signals are captured using a Fuji phosphorimager.

[0932] Data is extracted using AIS software and following background subtraction, signal normalization is performed. This includes a normalization of filter-wide expression levels between different experimental runs. Genes that are differentially expressed in the tissue of interest are identified.

### Example 4

[0933] Chromosomal Mapping of the Polynucleotides

[0934] An oligonucleotide primer set is designed according to the sequence at the 5′ end of SEQ ID NO:X. This primer preferably spans about 100 nucleotides. This primer set is then used in a polymerase chain reaction under the following set of conditions: 30 seconds, 95° C.; 1 minute, 56° C.; 1 minute, 70° C. This cycle is repeated 32 times followed by one 5 minute cycle at 70° C. Human, mouse, and hamster DNA is used as template in addition to a somatic cell hybrid panel containing individual chromosomes or chromosome fragments (Bios, Inc). The reactions are analyzed on either 8% polyacrylamide gels or 3.5 % agarose gels. Chromosome mapping is determined by the presence of an approximately 100 bp PCR fragment in the particular somatic cell hybrid.

### Example 5

[0935] Bacterial Expression of a Polypeptide

[0936] A polynucleotide encoding a polypeptide of the present invention is amplified using PCR oligonucleotide primers corresponding to the 5′ and 3′ ends of the DNA sequence, as outlined in Example 1, to synthesize insertion fragments. The primers used to amplify the cDNA insert should preferably contain restriction sites, such as BamHI and XbaI, at the 5′ end of the primers in order to clone the amplified product into the expression vector. For example, BamHI and XbaI correspond to the restriction enzyme sites on the bacterial expression vector pQE-9. (Qiagen, Inc., Chatsworth, Calif.). This plasmid vector encodes antibiotic resistance (Ampr), a bacterial origin of replication (ori), an IPTG-regulatable promoter/operator (P/O), a ribosome binding site (RBS), a 6-histidine tag (6-His), and restriction enzyme cloning sites.

[0937] The pQE-9 vector is digested with BamHI and XbaI and the amplified fragment is ligated into the pQE-9 vector maintaining the reading frame initiated at the bacterial RBS. The ligation mixture is then used to transform the E. coli strain M15/rep4 (Qiagen, Inc.) which contains multiple copies of the plasmid pREP4, which expresses the lacd repressor and also confers kanamycin resistance (Kan^{r}). Transformants are identified by their ability to grow on LB plates and ampicillin/kanamycin resistant colonies are selected. Plasmid DNA is isolated and confirmed by restriction analysis.

[0938] Clones containing the desired constructs are grown overnight (O/N) in liquid culture in LB media supplemented with both Amp (100 ug/ml) and Kan (25 ug/ml). The O/N culture is used to inoculate a large culture at a ratio of 1:100 to 1:250. The cells are grown to an optical density 600 (O.D.⁶⁰⁰) of between 0.4 and 0.6. IPTG (Isopropyl-B-D-thiogalacto pyranoside) is then added to a final concentration of 1 mM. IPTG induces by inactivating the lacd repressor, clearing the P/O leading to increased gene expression.

[0939] Cells are grown for an extra 3 to 4 hours. Cells are then harvested by centrifugation (20 mins at 6000×g). The cell pellet is solubilized in the chaotropic agent 6 Molar Guanidine HCl by stirring for 3-4 hours at 4° C. The cell debris is removed by centrifugation, and the supernatant containing the polypeptide is loaded onto a nickel-nitrilo-tri-acetic acid (“Ni-NTA”) affinity resin column (available from QIAGEN, Inc., supra). Proteins with a 6× His tag bind to the Ni-NTA resin with high affinity and can be purified in a simple one-step procedure (for details see: The QIAexpressionist (1995) QIAGEN, Inc., supra).

[0940] Briefly, the supernatant is loaded onto the column in 6 M guanidine-HCl, pH 8. The column is first washed with 10 volumes of 6 M guanidine-HCl, pH 8, then washed with 10 volumes of 6 M guanidine-HCl pH 6, and finally the polypeptide is eluted with 6 M guanidine-HCl, pH 5.

[0941] The purified protein is then renatured by dialyzing it against phosphate-buffered saline (PBS) or 50 mM Na-acetate, pH 6 buffer plus 200 mM NaCl. Alternatively, the protein can be successfully refolded while immobilized on the Ni-NTA column. The recommended conditions are as follows: renature using a linear 6M-1M urea gradient in 500 mM NaCl, 20% glycerol, 20 mM Tris/HCl pH 7.4, containing protease inhibitors. The renaturation should be performed over a period of 1.5 hours or more. After renaturation the proteins are eluted by the addition of 250 mM immidazole. Immidazole is removed by a final dialyzing step against PBS or 50 mM sodium acetate pH 6 buffer plus 200 mM NaCl. The purified protein is stored at 4° C. or frozen at −80° C.

[0942] In addition to the above expression vector, the present invention further includes an expression vector, called pHE4a (ATCC Accession Number 209645, deposited on Feb. 25, 1998) which contains phage operator and promoter elements operatively linked to a polynucleotide of the present invention. This vector contains: 1) a neomycinphosphotransferase gene as a selection marker, 2) an E. coli origin of replication, 3) a T5 phage promoter sequence, 4) two lac operator sequences, 5) a Shine-Delgarno sequence, and 6) the lactose operon repressor gene (lacIq). The origin of replication (oriC) is derived from pUC19 (LTI, Gaithersburg, Md.). The promoter and operator sequences are made synthetically.

[0943] DNA can be inserted into the pHE4a by restricting the vector with NdeI and XbaI, BamHI, XhoI, or Asp718, running the restricted product on a gel, and isolating the larger fragment (the stuffer fragment should be about 310 base pairs). The DNA insert is generated according to the PCR protocol described in Example 1, using PCR primers having restriction sites for NdeI (5′ primer) and XbaI, BamHI, XhoI, or Asp718 (3′ primer). The PCR insert is gel purified and restricted with compatible enzymes. The insert and vector are ligated according to standard protocols.

[0944] The engineered vector could easily be substituted in the above protocol to express protein in a bacterial system.

### Example 6

[0945] Purification of a Polypeptide from an Inclusion Body

[0946] The following alternative method can be used to purify a polypeptide expressed in E coli when it is present in the form of inclusion bodies. Unless otherwise specified, all of the following steps are conducted at 4-10° C.

[0947] Upon completion of the production phase of the E. coli fermentation, the cell culture is cooled to 4-10° C. and the cells harvested by continuous centrifugation at 15,000 rpm (Heraeus Sepatech). On the basis of the expected yield of protein per unit weight of cell paste and the amount of purified protein required, an appropriate amount of cell paste, by weight, is suspended in a buffer solution containing 100 mM Tris, 50 mM EDTA, pH 7.4. The cells are dispersed to a homogeneous suspension using a high shear mixer.

[0948] The cells are then lysed by passing the solution through a microfluidizer (Microfaidics, Corp. or APV Gaulin, Inc.) twice at 4000-6000 psi. The homogenate is then mixed with NaCl solution to a final concentration of 0.5 M NaCl, followed by centrifugation at 7000×g for 15 min. The resultant pellet is washed again using 0.5M NaCl, 100 mM Tris, 50 mM EDTA, pH 7.4.

[0949] The resulting washed inclusion bodies are solubilized with 1.5 M guanidine hydrochloride (GuHCl) for 2-4 hours. After 7000×g centrifugation for 15 min., the pellet is discarded and the polypeptide containing supernatant is incubated at 4° C. overnight to allow further GuHCl extraction.

[0950] Following high speed centrifugation (30,000×g) to remove insoluble particles, the GuHCl solubilized protein is refolded by quickly mixing the GuHCl extract with 20 volumes of buffer containing 50 mM sodium, pH 4.5, 150 mM NaCl, 2 mM EDTA by vigorous stirring. The refolded diluted protein solution is kept at 4° C. without mixing for 12 hours prior to further purification steps.

[0951] To clarify the refolded polypeptide solution, a previously prepared tangential filtration unit equipped with 0.16 μm membrane filter with appropriate surface area (e.g., Filtron), equilibrated with 40 mM sodium acetate, pH 6.0 is employed. The filtered sample is loaded onto a cation exchange resin (e.g., Poros HS-50, Perseptive Biosystems). The column is washed with 40 mM sodium acetate, pH 6.0 and eluted with 250 mM, 500 mM, 1000 mM, and 1500 mM NaCl in the same buffer, in a stepwise manner. The absorbance at 280 nm of the effluent is continuously monitored. Fractions are collected and further analyzed by SDS-PAGE.

[0952] Fractions containing the polypeptide are then pooled and mixed with 4 volumes of water. The diluted sample is then loaded onto a previously prepared set of tandem columns of strong anion (Poros HQ-50, Perseptive Biosystems) and weak anion (Poros CM-20, Perseptive Biosystems) exchange resins. The columns are equilibrated with 40 mM sodium acetate, pH 6.0. Both columns are washed with 40 mM sodium acetate, pH 6.0, 200 mM NaCl. The CM-20 column is then eluted using a 10 column volume linear gradient ranging from 0.2 M NaCl, 50 mM sodium acetate, pH 6.0 to 1.0 M NaCl, 50 mM sodium acetate, pH 6.5. Fractions are collected under constant A₂₈₀ monitoring of the effluent. Fractions containing the polypeptide (determined, for instance, by 16% SDS-PAGE) are then pooled.

[0953] The resultant polypeptide should exhibit greater than 95% purity after the above refolding and purification steps. No major contaminant bands should be observed from Commassie blue stained 16% SDS-PAGE gel when 5 μg of purified protein is loaded. The purified protein can also be tested for endotoxin/LPS contamination, and typically the LPS content is less than 0.1 ng/ml according to LAL assays.

### Example 7

[0954] Cloning and Expression of a Polypeptide in a Baculovirus Expression System

[0955] In this example, the plasmid shuttle vector pA2 is used to insert a polynucleotide into a baculovirus to express a polypeptide. This expression vector contains the strong polyhedrin promoter of the Autographa californica nuclear polyhedrosis virus (AcMNPV) followed by convenient restriction sites such as BamHI, Xba I and Asp718. The polyadenylation site of the simian virus 40 (“SV40”) is used for efficient polyadenylation. For easy selection of recombinant virus, the plasmid contains the beta-galactosidase gene from E. coli under control of a weak Drosophila promoter in the same orientation, followed by the polyadenylation signal of the polyhedrin gene. The inserted genes are flanked on both sides by viral sequences for cell-mediated homologous recombination with wild-type viral DNA to generate a viable virus that express the cloned polynucleotide.

[0956] Many other baculovirus vectors can be used in place of the vector above, such as pAc373, pVL941, and pAcIM1, as one skilled in the art would readily appreciate, as long as the construct provides appropriately located signals for transcription, translation, secretion and the like, including a signal peptide and an in-frame AUG as required. Such vectors are described, for instance, in Luckow et al., Virology 170:31-39 (1989).

[0957] Specifically, the cDNA sequence contained in the deposited clone, including the AUG initiation codon, is amplified using the PCR protocol described in Example 1. If a naturally occurring signal sequence is used to produce the polypeptide of the present invention, the pA2 vector does not need a second signal peptide. Alternatively, the vector can be modified (pA2 GP) to include a baculovirus leader sequence, using the standard methods described in Summers et al., “A Manual of Methods for Baculovirus Vectors and Insect Cell Culture Procedures,” Texas Agricultural Experimental Station Bulletin No. 1555 (1987).

[0958] The amplified fragment is isolated from a 1% agarose gel using a commercially available kit (“Geneclean,” BIO 101 Inc., La Jolla, Calif.). The fragment then is digested with appropriate restriction enzymes and again purified on a 1% agarose gel.

[0959] The plasmid is digested with the corresponding restriction enzymes and optionally, can be dephosphorylated using calf intestinal phosphatase, using routine procedures known in the art. The DNA is then isolated from a 1% agarose gel using a commercially available kit (“Geneclean” BIO 101 Inc., La Jolla, Calif.).

[0960] The fragment and the dephosphorylated plasmid are ligated together with T4 DNA ligase. E. coli HB101 or other suitable E. coli hosts such as XL-1 Blue (Stratagene Cloning Systems, La Jolla, Calif.) cells are transformed with the ligation mixture and spread on culture plates. Bacteria containing the plasmid are identified by digesting DNA from individual colonies and analyzing the digestion product by gel electrophoresis. The sequence of the cloned fragment is confirmed by DNA sequencing.

[0961] Five μg of a plasmid containing the polynucleotide is co-transfected with 1.0 μg of a commercially available linearized baculovirus DNA (“BaculoGold™ baculovirus DNA”, Pharmingen, San Diego, Calif.), using the lipofection method described by Felgner et al., Proc. Natl. Acad. Sci. USA 84:7413-7417 (1987). One μg of BaculoGold™ virus DNA and 5 μg of the plasmid are mixed in a sterile well of a microtiter plate containing 50 μl of serum-free Grace's medium (Life Technologies Inc., Gaithersburg, Md.). Afterwards, 10 μl Lipofectin plus 90 μl Grace's medium are added, mixed and incubated for 15 minutes at room temperature. Then the transfection mixture is added drop-wise to Sf9 insect cells (ATCC CRL 1711) seeded in a 35 mm tissue culture plate with 1 ml Grace's medium without serum. The plate is then incubated for 5 hours at 27° C. The transfection solution is then removed from the plate and 1 ml of Grace's insect medium supplemented with 10% fetal calf serum is added. Cultivation is then continued at 27° C. for four days.

[0962] After four days the supernatant is collected and a plaque assay is performed, as described by Summers and Smith, supra. An agarose gel with “Blue Gal” (Life Technologies Inc., Gaithersburg) is used to allow easy identification and isolation of gal-expressing clones, which produce blue-stained plaques. (A detailed description of a “plaque assay” of this type can also be found in the user's guide for insect cell culture and baculovirology distributed by Life Technologies Inc., Gaithersburg, page 9-10.) After appropriate incubation, blue stained plaques are picked with the tip of a micropipettor (e.g., Eppendorf). The agar containing the recombinant viruses is then resuspended in a microcentrifuge tube containing 200 μl of Grace's medium and the suspension containing the recombinant baculovirus is used to infect Sf9 cells seeded in 35 mm dishes. Four days later the supernatants of these culture dishes are harvested and then they are stored at 4° C.

[0963] To verify the expression of the polypeptide, Sf9 cells are grown in Grace's medium supplemented with 10% heat-inactivated FBS. The cells are infected with the recombinant baculovirus containing the polynucleotide at a multiplicity of infection (“MOI”) of about 2. If radiolabeled proteins are desired, 6 hours later the medium is removed and is replaced with SF900 II medium minus methionine and cysteine (available from Life Technologies Inc., Rockville, Md.). After 42 hours, 5 μCi of ³⁵S-methionine and 5 μCi ³⁵S-cysteine (available from Amersham) are added. The cells are further incubated for 16 hours and then are harvested by centrifugation. The proteins in the supernatant as well as the intracellular proteins are analyzed by SDS-PAGE followed by autoradiography (if radiolabeled).

[0964] Microsequencing of the amino acid sequence of the amino terminus of purified protein may be used to determine the amino terminal sequence of the produced protein.

### Example 8

[0965] Expression of a Polypeptide in Mammalian Cells

[0966] The polypeptide of the present invention can be expressed in a mammalian cell. A typical mammalian expression vector contains a promoter element, which mediates the initiation of transcription of mRNA, a protein coding sequence, and signals required for the termination of transcription and polyadenylation of the transcript. Additional elements include enhancers, Kozak sequences and intervening sequences flanked by donor and acceptor sites for RNA splicing. Highly efficient transcription is achieved with the early and late promoters from SV40, the long terminal repeats (LTRs) from Retroviruses, e.g., RSV, HTLVI, HIVI and the early promoter of the cytomegalovirus (CMV). However, cellular elements can also be used (e.g., the human actin promoter).

[0967] Suitable expression vectors for use in practicing the present invention include, for example, vectors such as pSVL and pMSG (Pharmacia, Uppsala, Sweden), pRSVcat (ATCC 37152), pSV2dhfr (ATCC 37146), pBC12MI (ATCC 67109), pCMVSport 2.0, and pCMVSport 3.0. Mammalian host cells that could be used include, human Hela, 293, H9 and Jurkat cells, mouse NIH3T3 and C127 cells, Cos 1, Cos 7 and CV1, quail QC1-3 cells, mouse L cells and Chinese hamster ovary (CHO) cells.

[0968] Alternatively, the polypeptide can be expressed in stable cell lines containing the polynucleotide integrated into a chromosome. The co-transfection with a selectable marker such as DHFR, gpt, neomycin, or hygromycin allows the identification and isolation of the transfected cells.

[0969] The transfected gene can also be amplified to express large amounts of the encoded protein. The DHFR (dihydrofolate reductase) marker is useful in developing cell lines that carry several hundred or even several thousand copies of the gene of interest. (See, e.g., Alt, F. W., et al., J. Biol. Chem. 253:1357-1370 (1978); Hamlin, J. L. and Ma, C., Biochem. et Biophys. Acta, 1097:107-143 (1990); Page, M. J. and Sydenham, M. A., Biotechnology 9:64-68 (1991).) Another useful selection marker is the enzyme glutamine synthase (GS) (Murphy et al., Biochem J. 227:277-279 (1991); Bebbington et al., Bio/Technology 10:169-175 (1992). Using these markers, the mammalian cells are grown in selective medium and the cells with the highest resistance are selected. These cell lines contain the amplified gene(s) integrated into a chromosome. Chinese hamster ovary (CHO) and NSO cells are often used for the production of proteins.

[0970] Derivatives of the plasmid pSV2-dhfr (ATCC Accession No. 37146), the expression vectors pC4 (ATCC Accession No. 209646) and pC6 (ATCC Accession No.209647) contain the strong promoter (LTR) of the Rous Sarcoma Virus (Cullen et al., Molecular and Cellular Biology, 438-447 (March, 1985)) plus a fragment of the CMV-enhancer (Boshart et al., Cell 41:521-530 (1985).) Multiple cloning sites, e.g., with the restriction enzyme cleavage sites BamHI, XbaI and Asp718, facilitate the cloning of the gene of interest. The vectors also contain the 3′ intron, the polyadenylation and termination signal of the rat preproinsulin gene, and the mouse DHFR gene under control of the SV40 early promoter.

[0971] Specifically, the plasmid pC6, for example, is digested with appropriate restriction enzymes and then dephosphorylated using calf intestinal phosphates by procedures known in the art. The vector is then isolated from a 1% agarose gel.

[0972] A polynucleotide of the present invention is amplified according to the protocol outlined in Example 1. If a naturally occurring signal sequence is used to produce the polypeptide of the present invention, the vector does not need a second signal peptide. Alternatively, if a naturally occurring signal sequence is not used, the vector can be modified to include a heterologous signal sequence. (See, e.g., International Publication No. WO 96/34891.)

[0973] The amplified fragment is isolated from a 1% agarose gel using a commercially available kit (“Geneclean,” BIO 101 Inc., La Jolla, Calif.). The fragment then is digested with appropriate restriction enzymes and again purified on a 1% agarose gel.

[0974] The amplified fragment is then digested with the same restriction enzyme and purified on a 1% agarose gel. The isolated fragment and the dephosphorylated vector are then ligated with T4 DNA ligase. E. coli HB101 or XL-1 Blue cells are then transformed and bacteria are identified that contain the fragment inserted into plasmid pC6 using, for instance, restriction enzyme analysis.

[0975] Chinese hamster ovary cells lacking an active DHFR gene is used for transfection. Five μg of the expression plasmid pC6 or pC4 is cotransfected with 0.5 μg of the plasmid pSVneo using lipofectin (Felgner et al., supra). The plasmid pSV2-neo contains a dominant selectable marker, the neo gene from Tn5 encoding an enzyme that confers resistance to a group of antibiotics including G418. The cells are seeded in alpha minus MEM supplemented with 1 mg/ml G418. After 2 days, the cells are trypsinized and seeded in hybridoma cloning plates (Greiner, Germany) in alpha minus MEM supplemented with 10, 25, or 50 ng/ml of methotrexate plus 1 mg/ml G418. After about 10-14 days single clones are trypsinized and then seeded in 6-well petri dishes or 10 ml flasks using different concentrations of methotrexate (50 nM, 100 nM, 200 nM, 400 nM, 800 nM). Clones growing at the highest concentrations of methotrexate are then transferred to new 6-well plates containing even higher concentrations of methotrexate (1 μM, 2 μM, 5 μM, 10 mM, 20 mM). The same procedure is repeated until clones are obtained which grow at a concentration of 100-200 μM. Expression of the desired gene product is analyzed, for instance, by SDS-PAGE and Western blot or by reversed phase HPLC analysis.

### Example 9

[0976] Protein Fusions

[0977] The polypeptides of the present invention are preferably fused to other proteins. These fusion proteins can be used for a variety of applications. For example, fusion of the present polypeptides to His-tag, HA-tag, protein A, IgG domains, and maltose binding protein facilitates purification. (See Example 5; see also EP A 394,827; Traunecker, et al., Nature 331:84-86 (1988).) Similarly, fusion to IgG-1, IgG-3, and albumin increases the halflife time in vivo. Nuclear localization signals fused to the polypeptides of the present invention can target the protein to a specific subcellular localization, while covalent heterodimer or homodimers can increase or decrease the activity of a fusion protein. Fusion proteins can also create chimeric molecules having more than one function. Finally, fusion proteins can increase solubility and/or stability of the fused protein compared to the non-fused protein. All of the types of fusion proteins described above can be made by modifying the following protocol, which outlines the fusion of a polypeptide to an IgG molecule, or the protocol described in Example 5.

[0978] Briefly, the human Fc portion of the IgG molecule can be PCR amplified, using primers that span the 5′ and 3′ ends of the sequence described below. These primers also should have convenient restriction enzyme sites that will facilitate cloning into an expression vector, preferably a mammalian expression vector.

[0979] For example, if pC4 (ATCC Accession No. 209646) is used, the human Fc portion can be ligated into the BamHI cloning site. Note that the 3′ BamHI site should be destroyed. Next, the vector containing the human Fc portion is re-restricted with BamHI, linearizing the vector, and a polynucleotide of the present invention, isolated by the PCR protocol described in Example 1, is ligated into this BamHI site. Note that the polynucleotide is cloned without a stop codon, otherwise a fusion protein will not be produced.

[0980] If the naturally occurring signal sequence is used to produce the polypeptide of the present invention, pC4 does not need a second signal peptide. Alternatively, if the naturally occurring signal sequence is not used, the vector can be modified to include a heterologous signal sequence. (See, e.g., International Publication No. WO 96/34891.)

[0981] Human IgG Fc region:

| | |
|---|---|
| GGGATCCGGAGCCCAAATCTTCTGACAAAACTCACA | (SEQ ID NO: 1) |
| CATGCCCACCGTGCCCAGCACCTGAATTCGAGGGTG | |
| CACCGTCAGTCTTCCTCTTCCCCCCAAAACCCAAGG | |
| ACACCCTCATGATCTCCCGGACTCCTGAGGTCACAT | |
| GCGTGGTGGTGGACGTAAGCCACGAAGACCCTGAGG | |
| TCAAGTTCAACTGGTACGTGGACGGCGTGGAGGTGC | |
| ATAATGCCAAGACAAAGCCGCGGGAGGAGCAGTACA | |
| ACAGCACGTACCGTGTGGTCAGCGTCCTCACCGTCC | |
| TGCACCAGGACTGGCTGAATGGCAAGGAGTACAAGT | |
| GCAAGGTCTCCAACAAAGCCCTCCCAACCCCCATCG | |
| AGAAAACCATCTCCAAAGCCAAAGGGCAGCCCCGAG | |
| AACCACAGGTGTACACCCTGCCCCCATCCCGGGATG | |
| AGCTGACCAAGAACCAGGTCAGCCTGACCTGCCTGG | |
| TCAAAGGCTTCTATCCAAGCGACATCGCCGTGGAGT | |
| GGGAGAGCAATGGGCAGCCGGAGAACAACTACAAGA | |
| CCACGCCTCCCGTGCTGGACTCCGACGGCTCCTTCT | |
| TCCTCTACAGCAAGCTCACCGTGGACAAGAGCAGGT | |
| GGCAGCAGGGGAACGTCTTCTCATGCTCCGTGATGC | |
| ATGAGGCTCTGCACAACCACTACACGCAGAAGAGCC | |
| TCTCCCTGTCTCCGGGTAAATGAGTGCGACGGCCGC | |
| GACTCTAGAGGAT | |

### Example 10

[0982] Production of an Antibody from a Polypeptide Hybridoma Technology

[0983] The antibodies of the present invention can be prepared by a variety of methods. (See, Current Protocols, Chapter 2.) As one example of such methods, cells expressing polypeptide of the present invention are administered to an animal to induce the production of sera containing polyclonal antibodies. In a preferred method, a preparation of polypeptide of the present invention is prepared and purified to render it substantially free of natural contaminants. Such a preparation is then introduced into an animal in order to produce polyclonal antisera of greater specific activity.

[0984] Monoclonal antibodies specific for polypeptide of the present invention are prepared using hybridoma technology (Kohler et al., Nature 256:495 (1975); Kohler et al., Eur. J. Immunol. 6:511 (1976); Kohler et al., Eur. J. Immunol. 6:292 (1976); Hammerling et al., in: Monoclonal Antibodies and T-Cell Hybridomas, Elsevier, N.Y., pp. 563-681 (1981)). In general, an animal (preferably a mouse) is immunized with polypeptide of the present invention or, more preferably, with a secreted polypeptide of the present invention-expressing cell. Such polypeptide-expressing cells are cultured in any suitable tissue culture medium, preferably in Earle's modified Eagle's medium supplemented with 10% fetal bovine serum (inactivated at about 56° C.), and supplemented with about 10 g/l of nonessential amino acids, about 1,000 U/ml of penicillin, and about 100 μg/ml of streptomycin.

[0985] The splenocytes of such mice are extracted and fused with a suitable myeloma cell line. Any suitable myeloma cell line may be employed in accordance with the present invention; however, it is preferable to employ the parent myeloma cell line (SP20), available from the ATCC. After fusion, the resulting hybridoma cells are selectively maintained in HAT medium, and then cloned by limiting dilution as described by Wands et al. (Gastroenterology 80:225-232 (1981)). The hybridoma cells obtained through such a selection are then assayed to identify clones which secrete antibodies capable of binding the polypeptide of the present invention.

[0986] Alternatively, additional antibodies capable of binding to polypeptide of the present invention can be produced in a two-step procedure using anti-idiotypic antibodies. Such a method makes use of the fact that antibodies are themselves antigens, and therefore, it is possible to obtain an antibody which binds to a second antibody. In accordance with this method, protein specific antibodies are used to immunize an animal, preferably a mouse. The splenocytes of such an animal are then used to produce hybridoma cells, and the hybridoma cells are screened to identify clones which produce an antibody whose ability to bind to the polypeptide of the present invention-specific antibody can be blocked by polypeptide of the present invention. Such antibodies comprise anti-idiotypic antibodies to the polypeptide of the present invention-specific antibody and are used to immunize an animal to induce formation of further polypeptide of the present invention-specific antibodies.

[0987] For in vivo use of antibodies in humans, an antibody is “humanized”. Such antibodies can be produced using genetic constructs derived from hybridoma cells producing the monoclonal antibodies described above. Methods for producing chimeric and humanized antibodies are known in the art and are discussed herein. (See, for review, Morrison, Science 229:1202 (1985); Oi et al., BioTechniques 4:214 (1986); Cabilly et al., U.S. Pat. No. 4,816,567; Taniguchi et al., EP 171496; Morrison et al., EP 173494; Neuberger et al., WO 8601533; Robinson et al., International Publication No. WO 8702671; Boulianne et al., Nature 312:643 (1984); Neuberger et al., Nature 314:268 (1985).)

[0988] Isolation Of Antibody Fragments Directed Against Polypeptide of the Present Invention From A Library Of scFvs

[0989] Naturally occurring V-genes isolated from human PBLs are constructed into a library of antibody fragments which contain reactivities against polypeptide of the present invention to which the donor may or may not have been exposed (see e.g., U.S. Pat. No. 5,885,793 incorporated herein by reference in its entirety).

[0990] Rescue of the Library. A library of scFvs is constructed from the RNA of human PBLs as described in International Publication No. WO 92/01047. To rescue phage displaying antibody fragments, approximately 10⁹ E. coli harboring the phagemid are used to inoculate 50 ml of 2×TY containing 1% glucose and 100 μg/ml of ampicillin (2×TY-AMP-GLU) and grown to an O.D. of 0.8 with shaking. Five ml of this culture is used to inoculate 50 ml of 2×TY-AMP-GLU, 2×108 TU of delta gene 3 helper (M13 delta gene III, see International Publication No. WO 92/01047) are added and the culture incubated at 37° C. for 45 minutes without shaking and then at 37° C. for 45 minutes with shaking. The culture is centrifuged at 4000 r.p.m. for 10 min. and the pellet resuspended in 2 liters of 2×TY containing 100 1 μg/ml ampicillin and 50 ug/ml kanamycin and grown overnight. Phage are prepared as described in International Application No. WO 92/01047.

[0991] M13 delta gene III is prepared as follows: M13 delta gene III helper phage does not encode gene III protein, hence the phage(mid) displaying antibody fragments have a greater avidity of binding to antigen. Infectious M13 delta gene III particles are made by growing the helper phage in cells harboring a pUC19 derivative supplying the wild type gene III protein during phage morphogenesis. The culture is incubated for 1 hour at 37° C. without shaking and then for a further hour at 37° C. with shaking. Cells are spun down (IEC-Centra 8,400 r.p.m. for 10 min), resuspended in 300 ml 2×TY broth containing 100 μg ampicillin/ml and 25 μg kanamycin/ml (2×TY-AMP-KAN) and grown overnight, shaking at 37° C. Phage particles are purified and concentrated from the culture medium by two PEG-precipitations (Sambrook et al., 1990), resuspended in 2 ml PBS and passed through a 0.45 μm filter (Minisart NML; Sartorius) to give a final concentration of approximately 10¹³ transducing units/ml (ampicillin-resistant clones).

[0992] Panning of the Library. Immunotubes (Nunc) are coated overnight in PBS with 4 ml of either 100 μg/ml or 10 μg/ml of a polypeptide of the present invention. Tubes are blocked with 2% Marvel-PBS for 2 hours at 37° C. and then washed 3 times in PBS. Approximately 10¹³ TU of phage is applied to the tube and incubated for 30 minutes at room temperature tumbling on an over and under turntable and then left to stand for another 1.5 hours. Tubes are washed 10 times with PBS 0.1% Tween-20 and 10 times with PBS. Phage are eluted by adding 1 ml of 100 mM triethylamine and rotating 15 minutes on an under and over turntable after which the solution is immediately neutralized with 0.5 ml of 1.0M Tris-HCl, pH 7.4. Phage are then used to infect 10 ml of mid-log E. coli TG1 by incubating eluted phage with bacteria for 30 minutes at 37° C. The E. coli are then plated on TYE plates containing 1% glucose and 100 μg/ml ampicillin. The resulting bacterial library is then rescued with delta gene 3 helper phage as described above to prepare phage for a subsequent round of selection. This process is then repeated for a total of 4 rounds of affinity purification with tube-washing increased to 20 times with PBS, 0.1% Tween-20 and 20 times with PBS for rounds 3 and 4.

[0993] Characterization of Binders. Eluted phage from the 3rd and 4th rounds of selection are used to infect E. coli HB 2151 and soluble scFv is produced (Marks, et al., 1991) from single colonies for assay. ELISAs are performed with microtitre plates coated with 10 pg/ml of the polypeptide of the present invention in 50 mM bicarbonate pH 9.6. Clones positive in ELISA are further characterized by PCR fingerprinting (see, e.g., International Application No. WO 92/01047) and then by sequencing. These ELISA positive clones may also be further characterized by techniques known in the art, such as, for example, epitope mapping, binding affinity, receptor signal transduction, ability to block or competitively inhibit antibody/antigen binding, and competitive agonistic or antagonistic activity.

### Example 11

[0994] Method of Determining Alterations in a Gene Corresponding to a Polynucleotide

[0995] RNA isolated from entire families or individual patients presenting with a phenotype of interest (such as a disease) is isolated. cDNA is then generated from these RNA samples using protocols known in the art. (See, Sambrook.) The cDNA is then used as a template for PCR, employing primers surrounding regions of interest in SEQ ID NO:X; and/or the nucleotide sequence of the cDNA contained in Clone ID NO:Z. Suggested PCR conditions consist of 35 cycles at 95 degrees C. for 30 seconds; 60-120 seconds at 52-58 degrees C.; and 60-120 seconds at 70 degrees C., using buffer solutions described in Sidransky et al., Science 252:706 (1991).

[0996] PCR products are then sequenced using primers labeled at their 5′ end with T4 polynucleotide kinase, employing SequiTherm Polymerase (Epicentre Technologies). The intron-exon boundaries of selected exons is also determined and genomic PCR products analyzed to confirm the results. PCR products harboring suspected mutations are then cloned and sequenced to validate the results of the direct sequencing.

[0997] PCR products are cloned into T-tailed vectors as described in Holton et al., Nucleic Acids Research, 19:1156 (1991) and sequenced with T7 polymerase (United States Biochemical). Affected individuals are identified by mutations not present in unaffected individuals.

[0998] Genomic rearrangements are also observed as a method of determining alterations in a gene corresponding to a polynucleotide. Genomic clones isolated according to Example 2 are nick-translated with digoxigenindeoxy-uridine 5′-triphosphate (Boehringer Manheim), and FISH performed as described in Johnson et al., Methods Cell Biol. 35:73-99 (1991). Hybridization with the labeled probe is carried out using a vast excess of human cot-1 DNA for specific hybridization to the corresponding genomic locus.

[0999] Chromosomes are counterstained with 4,6-diamino-2-phenylidole and propidium iodide, producing a combination of C- and R-bands. Aligned images for precise mapping are obtained using a triple-band filter set (Chroma Technology, Brattleboro, Vt.) in combination with a cooled charge-coupled device camera (Photometrics, Tucson, Ariz.) and variable excitation wavelength filters. (Johnson et al., Genet. Anal. Tech. Appl., 8:75 (1991).) Image collection, analysis and chromosomal fractional length measurements are performed using the ISee Graphical Program System. (Inovision Corporation, Durham, N.C.) Chromosome alterations of the genomic region hybridized by the probe are identified as insertions, deletions, and translocations. These alterations are used as a diagnostic marker for an associated disease.

### Example 12

[1000] Method of Detecting Abnormal Levels of a Polypeptide in a Biological Sample

[1001] A polypeptide of the present invention can be detected in a biological sample, and if an increased or decreased level of the polypeptide is detected, this polypeptide is a marker for a particular phenotype. Methods of detection are numerous, and thus, it is understood that one skilled in the art can modify the following assay to fit their particular needs.

[1002] For example, antibody-sandwich ELISAs are used to detect polypeptides in a sample, preferably a biological sample. Wells of a microtiter plate are coated with specific antibodies, at a final concentration of 0.2 to 10 ug/ml. The antibodies are either monoclonal or polyclonal and are produced by the method described in Example 10. The wells are blocked so that non-specific binding of the polypeptide to the well is reduced.

[1003] The coated wells are then incubated for >2 hours at RT with a sample containing the polypeptide. Preferably, serial dilutions of the sample should be used to validate results. The plates are then washed three times with deionized or distilled water to remove unbound polypeptide.

[1004] Next, 50 ul of specific antibody-alkaline phosphatase conjugate, at a concentration of 25-400 ng, is added and incubated for 2 hours at room temperature. The plates are again washed three times with deionized or distilled water to remove unbound conjugate.

[1005] Add 75 ul of 4-methylumbelliferyl phosphate (MUP) or p-nitrophenyl phosphate (NPP) substrate solution to each well and incubate 1 hour at room temperature. Measure the reaction by a microtiter plate reader. Prepare a standard curve, using serial dilutions of a control sample, and plot polypeptide concentration on the X-axis (log scale) and fluorescence or absorbance of the Y-axis (linear scale). Interpolate the concentration of the polypeptide in the sample using the standard curve.

### Example 13

[1006] Formulation

[1007] The invention also provides methods of treatment and/or prevention of diseases or disorders (such as, for example, any one or more of the diseases or disorders disclosed herein) by administration to a subject of an effective amount of a Therapeutic. By therapeutic is meant polynucleotides or polypeptides of the invention (including fragments and variants), agonists or antagonists thereof, and/or antibodies thereto, in combination with a pharmaceutically acceptable carrier type (e.g., a sterile carrier).

[1008] The Therapeutic will be formulated and dosed in a fashion consistent with good medical practice, taking into account the clinical condition of the individual patient (especially the side effects of treatment with the Therapeutic alone), the site of delivery, the method of administration, the scheduling of administration, and other factors known to practitioners. The “effective amount” for purposes herein is thus determined by such considerations.

[1009] As a general proposition, the total pharmaceutically effective amount of the Therapeutic administered parenterally per dose will be in the range of about 1 ug/kg/day to 10 mg/kg/day of patient body weight, although, as noted above, this will be subject to therapeutic discretion. More preferably, this dose is at least 0.01 mg/kg/day, and most preferably for humans between about 0.01 and 1 mg/kg/day for the hormone. If given continuously, the Therapeutic is typically administered at a dose rate of about 1 ug/kg/hour to about 50 ug/kg/hour, either by 1-4 injections per day or by continuous subcutaneous infusions, for example, using a mini-pump. An intravenous bag solution may also be employed. The length of treatment needed to observe changes and the interval following treatment for responses to occur appears to vary depending on the desired effect.

[1010] Therapeutics can be are administered orally, rectally, parenterally, intracistemally, intravaginally, intraperitoneally, topically (as by powders, ointments, gels, drops or transdermal patch), bucally, or as an oral or nasal spray. “Pharmaceutically acceptable carrier” refers to a non-toxic solid, semisolid or liquid filler, diluent, encapsulating material or formulation auxiliary of any. The term “parenteral” as used herein refers to modes of administration which include intravenous, intramuscular, intraperitoneal, intrasternal, subcutaneous and intraarticular injection and infusion.

[1011] Therapeutics of the invention are also suitably administered by sustained-release systems. Suitable examples of sustained-release Therapeutics are administered orally, rectally, parenterally, intracistemally, intravaginally, intraperitoneally, topically (as by powders, ointments, gels, drops or transdermal patch), bucally, or as an oral or nasal spray. “Pharmaceutically acceptable carrier” refers to a non-toxic solid, semisolid or liquid filler, diluent, encapsulating material or formulation auxiliary of any type. The term “parenteral” as used herein refers to modes of administration which include intravenous, intramuscular, intraperitoneal, intrasternal, subcutaneous and intraarticular injection and infusion.

[1012] Therapeutics of the invention are also suitably administered by sustained-release systems. Suitable examples of sustained-release Therapeutics include suitable polymeric materials (such as, for example, semi-permeable polymer matrices in the form of shaped articles, e.g., films, or mirocapsules), suitable hydrophobic materials (for example as an emulsion in an acceptable oil) or ion exchange resins, and sparingly soluble derivatives (such as, for example, a sparingly soluble salt).

[1013] Sustained-release matrices include polylactides (U.S. Pat. No. 3,773,919, EP 58,481), copolymers of L-glutamic acid and gamma-ethyl-L-glutamate (Sidman et al., Biopolymers 22:547-556 (1983)), poly (2- hydroxyethyl methacrylate) (Langer et al., J. Biomed. Mater. Res. 15:167-277 (1981), and Langer, Chem. Tech. 12:98-105 (1982)), ethylene vinyl acetate (Langer et al., Id.) or poly-D- (−)-3-hydroxybutyric acid (EP 133,988).

[1014] Sustained-release Therapeutics also include liposomally entrapped Therapeutics of the invention (see generally, Langer, Science 249:1527-1533 (1990); Treat et al., in Liposomes in the Therapy of Infectious Disease and Cancer, Lopez-Berestein and Fidler (eds.), Liss, N.Y., pp. 317 -327 and 353-365 (1989)). Liposomes containing the Therapeutic are prepared by methods known per se: DE 3,218,121; Epstein et al., Proc. Natl. Acad. Sci. (USA) 82:3688-3692 (1985); Hwang et al., Proc. Natl. Acad. Sci.(USA) 77:4030-4034 (1980); EP 52,322; EP 36,676; EP 88,046; EP 143,949; EP 142,641; Japanese Pat. Appl. 83-118008; U.S. Pat. Nos. 4,485,045 and 4,544,545; and EP 102,324. Ordinarily, the liposomes are of the small (about 200-800 Angstroms) unilamellar type in which the lipid content is greater than about 30 mol. percent cholesterol, the selected proportion being adjusted for the optimal Therapeutic.

[1015] In yet an additional embodiment, the Therapeutics of the invention are delivered by way of a pump (see Langer, supra; Sefton, CRC Crit. Ref. Biomed. Eng. 14:201 (1987); Buchwald et al., Surgery 88:507 (1980); Saudek et al., N. Engl. J. Med. 321:574 (1989)).

[1016] Other controlled release systems are discussed in the review by Langer (Science 249:1527-1533 (1990)).

[1017] For parenteral administration, in one embodiment, the Therapeutic is formulated generally by mixing it at the desired degree of purity, in a unit dosage injectable form (solution, suspension, or emulsion), with a pharmaceutically acceptable carrier, i.e., one that is non-toxic to recipients at the dosages and concentrations employed and is compatible with other ingredients of the formulation. For example, the formulation preferably does not include oxidizing agents and other compounds that are known to be deleterious to the Therapeutic.

[1018] Generally, the formulations are prepared by contacting the Therapeutic uniformly and intimately with liquid carriers or finely divided solid carriers or both. Then, if necessary, the product is shaped into the desired formulation. Preferably the carrier is a parenteral carrier, more preferably a solution that is isotonic with the blood of the recipient. Examples of such carrier vehicles include water, saline, Ringer's solution, and dextrose solution. Non-aqueous vehicles such as fixed oils and ethyl oleate are also useful herein, as well as liposomes.

[1019] The carrier suitably contains minor amounts of additives such as substances that enhance isotonicity and chemical stability. Such materials are non-toxic to recipients at the dosages and concentrations employed, and include buffers such as phosphate, citrate, succinate, acetic acid, and other organic acids or their salts; antioxidants such as ascorbic acid; low molecular weight (less than about ten residues) polypeptides, e.g., polyarginine or tripeptides; proteins, such as serum albumin, gelatin, or immunoglobulins; hydrophilic polymers such as polyvinylpyrrolidone; amino acids, such as glycine, glutamic acid, aspartic acid, or arginine; monosaccharides, disaccharides, and other carbohydrates including cellulose or its derivatives, glucose, manose, or dextrins; chelating agents such as EDTA; sugar alcohols such as mannitol or sorbitol; counterions such as sodium; and/or nonionic surfactants such as polysorbates, poloxamers, or PEG.

[1020] The Therapeutic is typically formulated in such vehicles at a concentration of about 0.1 mg/ml to 100 mg/ml, preferably 1-10 mg/ml, at a pH of about 3 to 8. It will be understood that the use of certain of the foregoing excipients, carriers, or stabilizers will result in the formation of polypeptide salts.

[1021] Any pharmaceutical used for therapeutic administration can be sterile. Sterility is readily accomplished by filtration through sterile filtration membranes (e.g., 0.2 micron membranes). Therapeutics generally are placed into a container having a sterile access port, for example, an intravenous solution bag or vial having a stopper pierceable by a hypodermic injection needle.

[1022] Therapeutics ordinarily will be stored in unit or multi-dose containers, for example, sealed ampoules or vials, as an aqueous solution or as a lyophilized formulation for reconstitution. As an example of a lyophilized formulation, 10-ml vials are filled with 5 ml of sterile-filtered 1% (w/v) aqueous Therapeutic solution, and the resulting mixture is lyophilized. The infusion solution is prepared by reconstituting the lyophilized Therapeutic using bacteriostatic Water-for-Injection.

[1023] The invention also provides a pharmaceutical pack or kit comprising one or more containers filled with one or more of the ingredients of the Therapeutics of the invention. Associated with such container(s) can be a notice in the form prescribed by a governmental agency regulating the manufacture, use or sale of pharmaceuticals or biological products, which notice reflects approval by the agency of manufacture, use or sale for human administration. In addition, the Therapeutics may be employed in conjunction with other therapeutic compounds.

[1024] The Therapeutics of the invention may be administered alone or in combination with adjuvants. Adjuvants that may be administered with the Therapeutics of the invention include, but are not limited to, alum, alum plus deoxycholate (ImmunoAg), MTP-PE (Biocine Corp.), QS21 (Genentech, Inc.), BCG (e.g., THERACYS®), MPL and nonviable prepartions of Corynebacterium parvum. In a specific embodiment, Therapeutics of the invention are administered in combination with alum. In another specific embodiment, Therapeutics of the invention are administered in combination with QS-21. Further adjuvants that may be administered with the Therapeutics of the invention include, but are not limited to, Monophosphoryl lipid immunomodulator, AdjuVax 100a, QS-21, QS-18, CRL1005, Aluminum salts, MF-59, and Virosomal adjuvant technology. Vaccines that may be administered with the Therapeutics of the invention include, but are not limited to, vaccines directed toward protection against MMR (measles, mumps, rubella), polio, varicella, tetanus/diptheria, hepatitis A, hepatitis B, haemophilus influenzae B, whooping cough, pneumonia, influenza, Lyme's Disease, rotavirus, cholera, yellow fever, Japanese encephalitis, poliomyelitis, rabies, typhoid fever, and pertussis. Combinations may be administered either concomitantly, e.g., as an admixture, separately but simultaneously or concurrently; or sequentially. This includes presentations in which the combined agents are administered together as a therapeutic mixture, and also procedures in which the combined agents are administered separately but simultaneously, e.g., as through separate intravenous lines into the same individual. Administration “in combination” further includes the separate administration of one of the compounds or agents given first, followed by the second.

[1025] The Therapeutics of the invention may be administered alone or in combination with other therapeutic agents. Therapeutic agents that may be administered in combination with the Therapeutics of the invention, include but not limited to, chemotherapeutic agents, antibiotics, steroidal and non-steroidal anti-inflammatories, conventional immunotherapeutic agents, and/or therapeutic treatments described below. Combinations may be administered either concomitantly, e.g., as an admixture, separately but simultaneously or concurrently; or sequentially. This includes presentations in which the combined agents are administered together as a therapeutic mixture, and also procedures in which the combined agents are administered separately but simultaneously, e.g., as through separate intravenous lines into the same individual. Administration “in combination” further includes the separate administration of one of the compounds or agents given first, followed by the second.

[1026] In certain embodiments, Therapeutics of the invention are administered in combination with antiretroviral agents, nucleoside/nucleotide reverse transcriptase inhibitors (NRTIs), non-nucleoside reverse transcriptase inhibitors (NNRTIs), and/or protease inhibitors (PIs). NRTIs that may be administered in combination with the Therapeutics of the invention, include, but are not limited to, RETROVIR™ (zidovudine/AZT), VIDEX™ (didanosine/ddI), HIVID™ (zalcitabine/ddC), ZERIT™ (stavudine/d4T), EPIVIR™ (lamivudine/3TC), and COMBIVIR™ (zidovudine/lamivudine). NNRTIs that may be administered in combination with the Therapeutics of the invention, include, but are not limited to, VIRAMUNE™ (nevirapine), RESCRIPTOR™ (delavirdine), and SUSTIVA™ (efavirenz). Protease inhibitors that may be administered in combination with the Therapeutics of the invention, include, but are not limited to, CRIXIVAN™ (indinavir), NORVIR™ (ritonavir), INVIRASE™ (saquinavir), and VIRACEPT™ (nelfinavir). In a specific embodiment, antiretroviral agents, nucleoside reverse transcriptase inhibitors, non-nucleoside reverse transcriptase inhibitors, and/or protease inhibitors may be used in any combination with Therapeutics of the invention to treat AIDS and/or to prevent or treat HIV infection.

[1027] Additional NRTIs include LODENOSINE™ (F-ddA; an acid-stable adenosine NRTI; Triangle/Abbott; COVIRACIL™ (emtricitabine/FTC; structurally related to lamivudine (3TC) but with 3- to 10-fold greater activity in vitro; Triangle/Abbott); dOTC (BCH-10652, also structurally related to lamivudine but retains activity against a substantial proportion of lamivudine-resistant isolates; Biochem Pharma); Adefovir (refused approval for anti-HIV therapy by FDA; Gilead Sciences); PREVEON® (Adefovir Dipivoxil, the active prodrug of adefovir; its active form is PMEA-pp); TENOFOVIR™ (bis-POC PMPA, a PMPA prodrug; Gilead); DAPD/DXG (active metabolite of DAPD; Triangle/Abbott); D-D4FC (related to 3TC, with activity against AZT/3TC-resistant virus); GW420867X (Glaxo Wellcome); ZIAGEN™ (abacavir/159U89; Glaxo Wellcome Inc.); CS-87 (3′azido-2′, 3′-dideoxyuridine; WO 99/66936); and S-acyl-2-thioethyl (SATE)-bearing prodrug forms of β-L-FD4C and β-L-FddC (WO 98/17281).

[1028] Additional NNRTIs include COACTINON™ (Emivirine/MKC-442, potent NNRTI of the HEPT class; Triangle/Abbott); CAPRAVIRINE™ (AG-1549/S-1153, a next generation NNRTI with activity against viruses containing the K103N mutation; Agouron); PNU-142721 (has 20- to 50-fold greater activity than its predecessor delavirdine and is active against K103N mutants; Pharmacia & Upjohn); DPC-961 and DPC-963 (second-generation derivatives of efavirenz, designed to be active against viruses with the K103N mutation; DuPont); GW-420867X (has 25-fold greater activity than HBY097 and is active against K103N mutants; Glaxo Wellcome); CALANOLIDE A (naturally occurring agent from the latex tree; active against viruses containing either or both the Y181C and K103N mutations); and Propolis (WO 99/49830).

[1029] Additional protease inhibitors include LOPINAVIR™ (ABT378/r; Abbott Laboratories); BMS-232632 (an azapeptide; Bristol-Myres Squibb); TIPRANAVIR™ (PNU-140690, a non-peptic dihydropyrone; Pharmacia & Upjohn); PD-178390 (a nonpeptidic dihydropyrone; Parke-Davis); BMS 232632 (an azapeptide; Bristol-Myers Squibb); L-756,423 (an indinavir analog; Merck); DMP-450 (a cyclic urea compound; Avid & DuPont); AG-1776 (a peptidomimetic with in vitro activity against protease inhibitor-resistant viruses; Agouron); VX-175/GW-433908 (phosphate prodrug of amprenavir; Vertex & Glaxo Welcome); CGP61755 (Ciba); and AGENERASE™ (amprenavir; Glaxo Wellcome Inc.).

[1030] Additional antiretroviral agents include fusion inhibitors/gp41 binders. Fusion inhibitors/gp41 binders include T-20 (a peptide from residues 643-678 of the HIV gp41 transmembrane protein ectodomain which binds to gp41 in its resting state and prevents transformation to the fusogenic state; Trimeris) and T-1249 (a second-generation filsion inhibitor; Trimeris).

[1031] Additional antiretroviral agents include fusion inhibitors/chemokine receptor antagonists. Fusion inhibitors/chemokine receptor antagonists include CXCR4 antagonists such as AMD 3100 (a bicyclam), SDF-1 and its analogs, and ALX40-4C (a cationic peptide), T22 (an 18 amino acid peptide; Trimeris) and the T22 analogs T134 and T140; CCR5 antagonists such as RANTES (9-68), AOP-RANTES, NNY-RANTES, and TAK-779; and CCR5/CXCR4 antagonists such as NSC 651016 (a distamycin analog). Also included are CCR2B, CCR3, and CCR6 antagonists. Chemokine recpetor agonists such as RANTES, SDF-1, MIP-1α, MIP-1β, etc., may also inhibit fusion.

[1032] Additional antiretroviral agents include integrase inhibitors. Integrase inhibitors include dicaffeoylquinic (DFQA) acids; L-chicoric acid (a dicaffeoyltartaric (DCTA) acid); quinalizarin (QLC) and related anthraquinones; ZINTEVIR™ (AR 177, an oligonucleotide that probably acts at cell surface rather than being a true integrase inhibitor; Arondex); and naphthols such as those disclosed in WO 98/50347.

[1033] Additional antiretroviral agents include hydroxyurea-like compunds such as BCX-34 (a purine nucleoside phosphorylase inhibitor; Biocryst); ribonucleotide reductase inhibitors such as DIDOX™ (Molecules for Health); inosine monophosphate dehydrogenase (IMPDH) inhibitors sucha as VX-497 (Vertex); and myvopholic acids such as CellCept (mycophenolate mofetil; Roche).

[1034] Additional antiretroviral agents include inhibitors of viral integrase, inhibitors of viral genome nuclear translocation such as arylene bis(methylketone) compounds; inhibitors of HIV entry such as AOP-RANTES, NNY-RANTES, RANTES-IgG fusion protein, soluble complexes of RANTES and glycosaminoglycans (GAG), and AMD-3100; nucleocapsid zinc finger inhibitors such as dithiane compounds; targets of HIV Tat and Rev; and pharmacoenhancers such as ABT-378.

[1035] Other antiretroviral therapies and adjunct therapies include cytokines and lymphokines such as MIP-1α, MIP-1β, SDF-1α, IL-2, PROLEUKIN™ (aldesleukin/L2-7001; Chiron), IL-4, IL-10, IL-12, and IL-13; interferons such as IFN-α2a; antagonists of TNFs, NFκB, GM-CSF, M-CSF, and IL-10; agents that modulate immune activation such as cyclosporin and prednisone; vaccines such as Remune™ (HIV Immunogen), APL 400-003 (Apollon), recombinant gp120 and fragments, bivalent (B/E) recombinant envelope glycoprotein, rgp120CM235, MN rgp120, SF-2 rgp120, gp120/soluble CD4 complex, Delta JR-FL protein, branched synthetic peptide derived from discontinuous gp120 C3/C4 domain, fusion-competent immunogens, and Gag, Pol, Nef, and Tat vaccines; gene-based therapies such as genetic suppressor elements (GSEs; WO 98/54366), and intrakines (genetically modified CC chemokines targetted to the ER to block surface expression of newly synthesized CCR5 (Yang et al., PNAS 94:11567-72 (1997); Chen et al., Nat. Med. 3:1110-16 (1997)); antibodies such as the anti-CXCR4 antibody 12G5, the anti-CCR5 antibodies 2D7, 5C7, PA8, PA9, PA10, PA11, PA12, and PA14, the anti-CD4 antibodies Q4120 and RPA-T4, the anti-CCR3 antibody 7B11, the anti-gp120 antibodies 17b, 48d, 447-52D, 257-D, 268-D and 50.1, anti-Tat antibodies, anti-TNF-α antibodies, and monoclonal antibody 33A; aryl hydrocarbon (AH) receptor agonists and antagonists such as TCDD, 3,3′,4,4′,5-pentachlorobiphenyl, 3,3′,4,4′-tetrachlorobiphenyl, and α-naphthoflavone (WO 98/30213); and antioxidants such as γ-L-glutamyl-L-cysteine ethyl ester (γ-GCE; WO 99/56764).

[1036] In a further embodiment, the Therapeutics of the invention are administered in combination with an antiviral agent. Antiviral agents that may be administered with the Therapeutics of the invention include, but are not limited to, acyclovir, ribavirin, amantadine, and remantidine.

[1037] In other embodiments, Therapeutics of the invention may be administered in combination with anti-opportunistic infection agents. Anti-opportunistic agents that may be administered in combination with the Therapeutics of the invention, include, but are not limited to, TRIMETHOPRIM-SULFAMETHOXAZOLE™, DAPSONE™, PENTAMIDINE™, ATOVAQUONE™, ISONIAZID™, RIFAMPIN™, PYRAZINAMIDE™, ETHAMBUTOL™, RIFABUTIN™, CLARITHROMYCIN™, AZITHROMYCIN™, GANCICLOVIR™, FOSCARNET™, CIDOFOVIR™, FLUCONAZOLE™, ITRACONAZOLE™, KETOCONAZOLE™, ACYCLOVIR™, FAMCICOLVIR™, PYRIMETHAMINE™, LEUCOVORIN™, NEUPOGEN™ (filgrastim/G-CSF), and LEUKINE™ (sargramostim/GM-CSF). In a specific embodiment, Therapeutics of the invention are used in any combination with TRIMETHOPRIM-SULFAMETHOXAZOLE™, DAPSONE™, PENTAMIDINE™, and/or ATOVAQUONE™ to prophylactically treat or prevent an opportunistic Pneumocystis carinii pneumonia infection. In another specific embodiment, Therapeutics of the invention are used in any combination with ISONIAZID™, RIFAMPIN™, PYRAZINAMIDE™, and/or ETHAMBUTOL™ to prophylactically treat or prevent an opportunistic Mycobacterium avium complex infection. In another specific embodiment, Therapeutics of the invention are used in any combination with RIFABUTIN™, CLARITHROMYCIN™, and/or AZITHROMYCIN™ to prophylactically treat or prevent an opportunistic Mycobacterium tuberculosis infection. In another specific embodiment, Therapeutics of the invention are used in any combination with GANCICLOVIR™, FOSCARNET™, and/or CIDOFOVIR™ to prophylactically treat or prevent an opportunistic cytomegalovirus infection. In another specific embodiment, Therapeutics of the invention are used in any combination with FLUCONAZOLE™, ITRACONAZOLE™, and/or KETOCONAZOLE™ to prophylactically treat or prevent an opportunistic fungal infection. In another specific embodiment, Therapeutics of the invention are used in any combination with ACYCLOVIR™ and/or FAMCICOLVIR™ to prophylactically treat or prevent an opportunistic herpes simplex virus type I and/or type II infection. In another specific embodiment, Therapeutics of the invention are used in any combination with PYRIMETHAMINE™ and/or LEUCOVORIN™ to prophylactically treat or prevent an opportunistic Toxoplasma gondii infection. In another specific embodiment, Therapeutics of the invention are used in any combination with LEUCOVORIN™ and/or NEUPOGEN™ to prophylactically treat or prevent an opportunistic bacterial infection.

[1038] In a further embodiment, the Therapeutics of the invention are administered in combination with an antibiotic agent. Antibiotic agents that may be administered with the Therapeutics of the invention include, but are not limited to, amoxicillin, beta-lactamases, aminoglycosides, beta-lactam (glycopeptide), beta-lactamases, Clindamycin, chloramphenicol, cephalosporins, ciprofloxacin, ciprofloxacin, erythromycin, fluoroquinolones, macrolides, metronidazole, penicillins, quinolones, rapamycin, rifampin, streptomycin, sulfonamide, tetracyclines, trimethoprim, trimethoprim-sulfamthoxazole, and vancomycin.

[1039] In other embodiments, Therapeutics of the invention are administered in combination with immunosuppressive agents. Immunosuppressive agents that may be administered in combination with the Therapeutics of the invention include, but are not limited to, steroids, cyclosporine, cyclosporine analogs, cyclophosphamide methylprednisone, prednisone, azathioprine, FK-506, 15-deoxyspergualin, and other immunosuppressive agents that act by suppressing the function of responding T cells. Other immunosuppressive agents that may be administered in combination with the Therapeutics of the invention include, but are not limited to, prednisolone, methotrexate, thalidomide, methoxsalen, rapamycin, leflunomide, mizoribine (BREDININ™), brequinar, deoxyspergualin, and azaspirane (SKF 105685), ORTHOCLONE OKT® 3 (muromonab-CD3), SANDIMMUNE™, NEORAL™, SANGDYA™ (cyclosporine), PROGRAF® (FK506, tacrolimus), CELLCEPT® (mycophenolate motefil, of which the active metabolite is mycophenolic acid), IMURAN™ (azathioprine), glucocorticosteroids, adrenocortical steroids such as DELTASONE™ (prednisone) and HYDELTRASOL™ (prednisolone), FOLEX™ and MEXATE™ (methotrxate), OXSORALEN-ULTRA™ (methoxsalen) and RAPAMUNE™ (sirolimus). In a specific embodiment, immunosuppressants may be used to prevent rejection of organ or bone marrow transplantation.

[1040] In an additional embodiment, Therapeutics of the invention are administered alone or in combination with one or more intravenous immune globulin preparations. Intravenous immune globulin preparations that may be administered with the Therapeutics of the invention include, but not limited to, GAMMAR™, IVEEGAM™, SANDOGLOBULIN™, GAMMAGARD S/D™, ATGAM™ (antithymocyte glubulin), and GAMIMUNE™. In a specific embodiment, Therapeutics of the invention are administered in combination with intravenous immune globulin preparations in transplantation therapy (e.g., bone marrow transplant).

[1041] In certain embodiments, the Therapeutics of the invention are administered alone or in combination with an anti-inflammatory agent. Anti-inflammatory agents that may be administered with the Therapeutics of the invention include, but are not limited to, corticosteroids (e.g. betamethasone, budesonide, cortisone, dexamethasone, hydrocortisone, methylprednisolone, prednisolone, prednisone, and triamcinolone), nonsteroidal anti-inflammatory drugs (e.g., diclofenac, diflunisal, etodolac, fenoprofen, floctafenine, flurbiprofen, ibuprofen, indomethacin, ketoprofen, meclofenamate, mefenamic acid, meloxicam, nabumetone, naproxen, oxaprozin, phenylbutazone, piroxicam, sulindac, tenoxicam, tiaprofenic acid, and tolmetin.), as well as antihistamines, aminoarylcarboxylic acid derivatives, arylacetic acid derivatives, arylbutyric acid derivatives, arylcarboxylic acids, arylpropionic acid derivatives, pyrazoles, pyrazolones, salicylic acid derivatives, thiazinecarboxamides, e-acetamidocaproic acid, S-adenosylmethionine, 3-amino-4-hydroxybutyric acid, amixetrine, bendazac, benzydamine, bucolome, difenpiramide, ditazol, emorfazone, guaiazulene, nabumetone, nimesulide, orgotein, oxaceprol, paranyline, perisoxal, pifoxime, proquazone, proxazole, and tenidap.

[1042] In an additional embodiment, the compositions of the invention are administered alone or in combination with an anti-angiogenic agent. Anti-angiogenic agents that may be administered with the compositions of the invention include, but are not limited to, Angiostatin (Entremed, Rockville, Md.), Troponin-1 (Boston Life Sciences, Boston, Mass.), anti-Invasive Factor, retinoic acid and derivatives thereof, paclitaxel (Taxol), Suramin, Tissue Inhibitor of Metalloproteinase-1, Tissue Inhibitor of Metalloproteinase-2, VEGI, Plasminogen Activator Inhibitor-1, Plasminogen Activator Inhibitor-2, and various forms of the lighter “d group” transition metals.

[1043] Lighter “d group” transition metals include, for example, vanadium, molybdenum, tungsten, titanium, niobium, and tantalum species. Such transition metal species may form transition metal complexes. Suitable complexes of the above-mentioned transition metal species include oxo transition metal complexes.

[1044] Representative examples of vanadium complexes include oxo vanadium complexes such as vanadate and vanadyl complexes. Suitable vanadate complexes include metavanadate and orthovanadate complexes such as, for example, ammonium metavanadate, sodium metavanadate, and sodium orthovanadate. Suitable vanadyl complexes include, for example, vanadyl acetylacetonate and vanadyl sulfate including vanadyl sulfate hydrates such as vanadyl sulfate mono- and trihydrates.

[1045] Representative examples of tungsten and molybdenum complexes also include oxo complexes. Suitable oxo tungsten complexes include tungstate and tungsten oxide complexes. Suitable tungstate complexes include ammonium tungstate, calcium tungstate, sodium tungstate dihydrate, and tungstic acid. Suitable tungsten oxides include tungsten (IV) oxide and tungsten (VI) oxide. Suitable oxo molybdenum complexes include molybdate, molybdenum oxide, and molybdenyl complexes. Suitable molybdate complexes include ammonium molybdate and its hydrates, sodium molybdate and its hydrates, and potassium molybdate and its hydrates. Suitable molybdenum oxides include molybdenum (VI) oxide, molybdenum (VI) oxide, and molybdic acid. Suitable molybdenyl complexes include, for example, molybdenyl acetylacetonate. Other suitable tungsten and molybdenum complexes include hydroxo derivatives derived from, for example, glycerol, tartaric acid, and sugars.

[1046] A wide variety of other anti-angiogenic factors may also be utilized within the context of the present invention. Representative examples include, but are not limited to, platelet factor 4; protamine sulphate; sulphated chitin derivatives (prepared from queen crab shells), (Murata et al., Cancer Res. 51:22-26, (1991)); Sulphated Polysaccharide Peptidoglycan Complex (SP-PG) (the function of this compound may be enhanced by the presence of steroids such as estrogen, and tamoxifen citrate); Staurosporine; modulators of matrix metabolism, including for example, proline analogs, cishydroxyproline, d,L-3,4-dehydroproline, Thiaproline, alpha,alpha-dipyridyl, aminopropionitrile fumarate; 4-propyl-5-(4-pyridinyl)-2(3H)-oxazolone; Methotrexate; Mitoxantrone; Heparin; Interferons; 2 Macroglobulin-serum; ChIMP-3 (Pavloff et al., J. Bio. Chem. 267:17321-17326, (1992)); Chymostatin (Tomkinson et al., Biochem J. 286:475-480, (1992)); Cyclodextrin Tetradecasulfate; Eponemycin; Camptothecin; Fumagillin (Ingber et al., Nature 348:555-557, (1990)); Gold Sodium Thiomalate (“GST”; Matsubara and Ziff, J. Clin. Invest. 79:1440-1446, (1987)); anticollagenase-serum; alpha2-antiplasmin (Holmes et al., J. Biol. Chem. 262(4):1659-1664, (1987)); Bisantrene (National Cancer Institute); Lobenzarit disodium (N-(2)-carboxyphenyl-4-chloroanthronilic acid disodium or “CCA”; (Takeuchi et al., Agents Actions 36:312-316, (1992)); and metalloproteinase inhibitors such as BB94.

[1047] Additional anti-angiogenic factors that may also be utilized within the context of the present invention include Thalidomide, (Celgene, Warren, N.J.); Angiostatic steroid; AGM-1470 (H. Brem and J. Folkman J Pediatr. Surg. 28:445-51 (1993)); an integrin alpha v beta 3 antagonist (C. Storgard et al., J Clin. Invest. 103:47-54 (1999)); carboxynaminolmidazole; Carboxyamidotriazole (CAI) (National Cancer Institute, Bethesda, Md.); Conbretastatin A-4 (CA4P) (OXiGENE, Boston, Mass.); Squalamine (Magainin Pharmaceuticals, Plymouth Meeting, Pa.); TNP-470, (Tap Pharmaceuticals, Deerfield, Ill.); ZD-0101 AstraZeneca (London, UK); APRA (CT2584); Benefin, Byrostatin-1 (SC339555); CGP-41251 (PKC 412); CM101; Dexrazoxane (ICRF187); DMXAA; Endostatin; Flavopridiol; Genestein; GTE; ImmTher; Iressa (ZD1839); Octreotide (Somatostatin); Panretin; Penacillamine; Photopoint; PI-88; Prinomastat (AG-3340) Purlytin; Suradista (FCE26644); Tamoxifen (Nolvadex); Tazarotene; Tetrathiomolybdate; Xeloda (Capecitabine); and 5-Fluorouracil.

[1048] Anti-angiogenic agents that may be administed in combination with the compounds of the invention may work through a variety of mechanisms including, but not limited to, inhibiting proteolysis of the extracellular matrix, blocking the function of endothelial cell-extracellular matrix adhesion molecules, by antagonizing the function of angiogenesis inducers such as growth factors, and inhibiting integrin receptors expressed on proliferating endothelial cells. Examples of anti-angiogenic inhibitors that interfere with extracellular matrix proteolysis and which may be administered in combination with the compositons of the invention include, but are not lmited to, AG-3340 (Agouron, La Jolla, Calif.), BAY-12-9566 (Bayer, West Haven, Conn.), BMS-275291 (Bristol Myers Squibb, Princeton, N.J.), CGS-27032A (Novartis, East Hanover, N.J.), Marimastat (British Biotech, Oxford, UK), and Metastat (Aetema, St-Foy, Quebec). Examples of anti-angiogenic inhibitors that act by blocking the function of endothelial cell-extracellular matrix adhesion molecules and which may be administered in combination with the compositons of the invention include, but are not lmited to, EMD-121974 (Merck KcgaA Darmstadt, Germany) and Vitaxin (Ixsys, La Jolla, Caalif./Medimmune, Gaithersburg, Md.). Examples of anti-angiogenic agents that act by directly antagonizing or inhibiting angiogenesis inducers and which may be administered in combination with the compositons of the invention include, but are not lmited to, Angiozyme (Ribozyme, Boulder, Colo.), Anti-VEGF antibody (Genentech, S. San Francisco, Calif.), PTK-787/ZK-225846 (Novartis, Basel, Switzerland), SU-101 (Sugen, S. San Francisco, Calif.), SU-5416 (Sugen/Pharmacia Upjohn, Bridgewater, N.J.), and SU-6668 (Sugen). Other anti-angiogenic agents act to indirectly inhibit angiogenesis. Examples of indirect inhibitors of angiogenesis which may be administered in combination with the compositons of the invention include, but are not limited to, IM-862 (Cytran, Kirkland, Wash.), Interferon-alpha, IL-12 (Roche, Nutley, N.J.), and Pentosan polysulfate (Georgetown University, Washington, D.C.).

[1049] In particular embodiments, the use of compositions of the invention in combination with anti-angiogenic agents is contemplated for the treatment, prevention, and/or amelioration of an autoimmune disease, such as for example, an autoimmune disease described herein.

[1050] In a particular embodiment, the use of compositions of the invention in combination with anti-angiogenic agents is contemplated for the treatment, prevention, and/or amelioration of arthritis. In a more particular embodiment, the use of compositions of the invention in combination with anti-angiogenic agents is contemplated for the treatment, prevention, and/or amelioration of rheumatoid arthritis.

[1051] In another embodiment, the polynucleotides encoding a polypeptide of the present invention are administered in combination with an angiogenic protein, or polynucleotides encoding an angiogenic protein. Examples of angiogenic proteins that may be administered with the compositions of the invention include, but are not limited to, acidic and basic fibroblast growth factors, VEGF-1, VEGF-2, VEGF-3, epidermal growth factor alpha and beta, platelet-derived endothelial cell growth factor, platelet-derived growth factor, tumor necrosis factor alpha, hepatocyte growth factor, insulin-like growth factor, colony stimulating factor, macrophage colony stimulating factor, granulocyte/macrophage colony stimulating factor, and nitric oxide synthase.

[1052] In additional embodiments, compostions of the invention are administered in combination with a chemotherapeutic agent. Chemotherapeutic agents that may be administered with the Therapeutics of the invention include, but are not limited to alkylating agents such as nitrogen mustards (for example, Mechlorethamine, cyclophosphamide, Cyclophosphamide Ifosfamide, Melphalan (L-sarcolysin), and Chlorambucil), ethylenimines and methylmelamines (for example, Hexamethylmelamine and Thiotepa), alkyl sulfonates (for example, Busulfan), nitrosoureas (for example, Carmustine (BCNU), Lomustine (CCNU), Semustine (methyl-CCNU), and Streptozocin (streptozotocin)), triazenes (for example, Dacarbazine (DTIC; dimethyltriazenoimidazolecarboxamide)), folic acid analogs (for example, Methotrexate (amethopterin)), pyrimidine analogs (for example, Fluorouacil (5-fluorouracil; 5-FU), Floxuridine (fluorodeoxyuridine; FudR), and Cytarabine (cytosine arabinoside)), purine analogs and related inhibitors (for example, Mercaptopurine (6-mercaptopurine; 6-MP), Thioguanine (6-thioguanine; TG), and Pentostatin (2′-deoxycoformycin)), vinca alkaloids (for example, Vinblastine (VLB, vinblastine sulfate) and Vincristine (vincristine sulfate)), epipodophyllotoxins (for example, Etoposide and Teniposide), antibiotics (for example, Dactinomycin (actinomycin D), Daunorubicin (daunomycin; rubidomycin), Doxorubicin, Bleomycin, Plicamycin (mithramycin), and Mitomycin (mitomycin C), enzymes (for example, L-Asparaginase), biological response modifiers (for example, Interferon-alpha and interferon-alpha-2b), platinum coordination compounds (for example, Cisplatin (cis-DDP) and Carboplatin), anthracenedione (Mitoxantrone), substituted ureas (for example, Hydroxyurea), methylhydrazine derivatives (for example, Procarbazine (N-methylhydrazine; MIH), adrenocorticosteroids (for example, Prednisone), progestins (for example, Hydroxyprogesterone caproate, Medroxyprogesterone, Medroxyprogesterone acetate, and Megestrol acetate), estrogens (for example, Diethylstilbestrol (DES), Diethylstilbestrol diphosphate, Estradiol, and Ethinyl estradiol), antiestrogens (for example, Tamoxifen), androgens (Testosterone proprionate, and Fluoxymesterone), antiandrogens (for example, Flutamide), gonadotropin-releasing horomone analogs (for example, Leuprolide), other hormones and hormone analogs (for example, methyltestosterone, estramustine, estramustine phosphate sodium, chlorotrianisene, and testolactone), and others (for example, dicarbazine, glutamic acid, and mitotane).

[1053] In one embodiment, the compositions of the invention are administered in combination with one or more of the following drugs: infliximab (also known as Remicade™ Centocor, Inc.), Trocade (Roche, RO-32-3555), Leflunomide (also known as Arava™ from Hoechst Marion Roussel), Kineret™ (an IL-1 Receptor antagonist also known as Anakinra from Amgen, Inc.).

[1054] In a specific embodiment, compositions of the invention are administered in combination with CHOP (cyclophosphamide, doxorubicin, vincristine, and prednisone) or combination of one or more of the components of CHOP. In one embodiment, the compositions of the invention are administered in combination with anti-CD20 antibodies, human monoclonal anti-CD20 antibodies. In another embodiment, the compositions of the invention are administered in combination with anti-CD20 antibodies and CHOP, or anti-CD20 antibodies and any combination of one or more of the components of CHOP, particularly cyclophosphamide and/or prednisone. In a specific embodiment, compositions of the invention are administered in combination with Rituximab. In a further embodiment, compositions of the invention are administered with Rituximab and CHOP, or Rituximab and any combination of one or more of the components of CHOP, particularly cyclophosphamide and/or prednisone. In a specific embodiment, compositions of the invention are administered in combination with tositumomab. In a further embodiment, compositions of the invention are administered with tositumomab and CHOP, or tositumomab and any combination of one or more of the components of CHOP, particularly cyclophosphamide and/or prednisone. The anti-CD20 antibodies may optionally be associated with radioisotopes, toxins or cytotoxic prodrugs.

[1055] In another specific embodiment, the compositions of the invention are administered in combination Zevalin™. In a further embodiment, compositions of the invention are administered with Zevalin™ and CHOP, or Zevalin™ and any combination of one or more of the components of CHOP, particularly cyclophosphamide and/or prednisone. Zevalin™ may be associated with one or more radisotopes. Particularly preferred isotopes are ⁹⁰Y and ¹¹¹In.

[1056] In an additional embodiment, the Therapeutics of the invention are administered in combination with cytokines. Cytokines that may be administered with the Therapeutics of the invention include, but are not limited to, IL2, IL3, IL4, IL5, IL6, IL7, IL10, IL12, IL13, IL15, anti-CD40, CD40L, IFN-gamma and TNF-alpha. In another embodiment, Therapeutics of the invention may be administered with any interleukin, including, but not limited to, IL-1alpha, IL-1beta, IL-2, IL-3, IL-4, IL-5, IL-6, IL-7, IL-8, IL-9, IL-10, IL-11, IL-12, IL-13, IL-14, IL-15, IL-16, IL--17, IL-18, IL-19, IL-20, and IL-21.

[1057] In one embodiment, the Therapeutics of the invention are administered in combination with members of the TNF family. TNF, TNF-related or TNF-like molecules that may be administered with the Therapeutics of the invention include, but are not limited to, soluble forms of TNF-alpha, lymphotoxin-alpha (LT-alpha, also known as TNF-beta), LT-beta (found in complex heterotrimer LT-alpha2-beta), OPGL, FasL, CD27L, CD30L, CD40L, 4-1BBL, DcR3, OX40L, TNF-gamma (International Publication No. WO 96/14328), AIM-I (International Publication No. WO 97/33899), endokine-alpha (International Publication No. WO 98/07880), OPG, and neutrokine-alpha (International Publication No. WO 98/18921, OX40, and nerve growth factor (NGF), and soluble forms of Fas, CD30, CD27, CD40 and 4-IBB, TR2 (International Publication No. WO 96/34095), DR3 (International Publication No. WO 97/33904), DR4 (International Publication No. WO 98/32856), TR5 (International Publication No. WO 98/30693), TRANK, TR9 (International Publication No. WO 98/56892),TR10 (International Publication No. WO 98/54202), 312C2 (International Publication No. WO 98/06842), and TR12, and soluble forms CD154, CD70, and CD153.

[1058] In an additional embodiment, the Therapeutics of the invention are administered in combination with angiogenic proteins. Angiogenic proteins that may be administered with the Therapeutics of the invention include, but are not limited to, Glioma Derived Growth Factor (GDGF), as disclosed in European Patent Number EP-399816; Platelet Derived Growth Factor-A (PDGF-A), as disclosed in European Patent Number EP-682110; Platelet Derived Growth Factor-B (PDGF-B), as disclosed in European Patent Number EP-282317; Placental Growth Factor (PlGF), as disclosed in International Publication Number WO 92/06194; Placental Growth Factor-2 (PlGF-2), as disclosed in Hauser et al., Growth Factors, 4:259-268 (1993); Vascular Endothelial Growth Factor (VEGF), as disclosed in International Publication Number WO 90/13649; Vascular Endothelial Growth Factor-A (VEGF-A), as disclosed in European Patent Number EP-506477; Vascular Endothelial Growth Factor-2 (VEGF-2), as disclosed in International Publication Number WO 96/39515; Vascular Endothelial Growth Factor B (VEGF-3); Vascular Endothelial Growth Factor B-186 (VEGF-B186), as disclosed in International Publication Number WO 96/26736; Vascular Endothelial Growth Factor-D (VEGF-D), as disclosed in International Publication Number WO 98/02543; Vascular Endothelial Growth Factor-D (VEGF-D), as disclosed in International Publication Number WO 98/07832; and Vascular Endothelial Growth Factor-E (VEGF-E), as disclosed in German Patent Number DE19639601. The above mentioned references are herein incorporated by reference in their entireties.

[1059] In an additional embodiment, the Therapeutics of the invention are administered in combination with Fibroblast Growth Factors. Fibroblast Growth Factors that may be administered with the Therapeutics of the invention include, but are not limited to, FGF-1, FGF-2, FGF-3, FGF-4, FGF-5, FGF-6, FGF-7, FGF-8, FGF-9, FGF-10, FGF-11, FGF-12, FGF-13, FGF-14, and FGF-15.

[1060] In an additional embodiment, the Therapeutics of the invention are administered in combination with hematopoietic growth factors. Hematopoietic growth factors that may be administered with the Therapeutics of the invention include, but are not limited to, granulocyte macrophage colony stimulating factor (GM-CSF) (sargramostim, LEUKINE™, PROKINE™), granulocyte colony stimulating factor (G-CSF) (filgrastim, NEUPOGEN™), macrophage colony stimulating factor (M-CSF, CSF-1) erythropoietin (epoetin alfa, EPOGEN™, PROCRIT™), stem cell factor (SCF, c-kit ligand, steel factor), megakaryocyte colony stimulating factor, PIXY321 (a GMCSF/IL-3 fusion protein), interleukins, especially any one or more of IL-1 through IL-12, interferon-gamma, or thrombopoietin.

[1061] In certain embodiments, Therapeutics of the present invention are administered in combination with adrenergic blockers, such as, for example, acebutolol, atenolol, betaxolol, bisoprolol, carteolol, labetalol, metoprolol, nadolol, oxprenolol, penbutolol, pindolol, propranolol, sotalol, and timolol.

[1062] In another embodiment, the Therapeutics of the invention are administered in combination with an antiarrhythmic drug (e.g., adenosine, amidoarone, bretylium, digitalis, digoxin, digitoxin, diliazem, disopyramide, esmolol, flecainide, lidocaine, mexiletine, moricizine, phenytoin, procainamide, N-acetyl procainamide, propafenone, propranolol, quinidine, sotalol, tocainide, and verapamil).

[1063] In another embodiment, the Therapeutics of the invention are administered in combination with diuretic agents, such as carbonic anhydrase-inhibiting agents (e.g., acetazolamide, dichlorphenamide, and methazolamide), osmotic diuretics (e.g., glycerin, isosorbide, mannitol, and urea), diuretics that inhibit Na⁺-K⁺-2Cl⁻ symport (e.g., furosemide, bumetanide, azosemide, piretanide, tripamide, ethacrynic acid, muzolimine, and torsemide), thiazide and thiazide-like diuretics (e.g., bendroflumethiazide, benzthiazide, chlorothiazide, hydrochlorothiazide, hydroflumethiazide, methyclothiazide, polythiazide, trichormethiazide, chlorthalidone, indapamide, metolazone, and quinethazone), potassium sparing diuretics (e.g., amiloride and triamterene), and mineralcorticoid receptor antagonists (e.g., spironolactone, canrenone, and potassium canrenoate).

[1064] In one embodiment, the Therapeutics of the invention are administered in combination with treatments for endocrine and/or hormone imbalance disorders. Treatments for endocrine and/or hormone imbalance disorders include, but are not limited to, ¹²⁷I, radioactive isotopes of iodine such as ¹³¹I and ¹²³I; recombinant growth hormone, such as HUMATROPE™ (recombinant somatropin); growth hormone analogs such as PROTROPIN™ (somatrem); dopamine agonists such as PARLODEL™ (bromocriptine); somatostatin analogs such as SANDOSTATIN™ (octreotide); gonadotropin preparations such as PREGNYL™, A.P.L.™ and PROFASI™ (chorionic gonadotropin (CG)), PERGONAL™ (menotropins), and METRODIN™ (urofollitropin (uFSH)); synthetic human gonadotropin releasing hormone preparations such as FACTREL™ and LUTREPULSE™ (gonadorelin hydrochloride); synthetic gonadotropin agonists such as LUPRON™ (leuprolide acetate), SUPPRELIN™ (histrelin acetate), SYNAREL™ (nafarelin acetate), and ZOLADEX™ (goserelin acetate); synthetic preparations of thyrotropin-releasing hormone such as RELEFACT TRH™ and THYPINONE™ (protirelin); recombinant human TSH such as THYROGEN™; synthetic preparations of the sodium salts of the natural isomers of thyroid hormones such as L-T₄™, SYNTHROID™ and LEVOTHROID™ (levothyroxine sodium), L-T₃™, CYTOMEL™ and TRIOSTAT™ (liothyroine sodium), and THYROLAR™ (liotrix); antithyroid compounds such as 6-n-propylthiouracil (propylthiouracil), 1-methyl-2-mercaptoimidazole and TAPAZOLE™ (methimazole), NEO-MERCAZOLE™ (carbimazole); beta-adrenergic receptor antagonists such as propranolol and esmolol; Ca²⁺ channel blockers; dexamethasone and iodinated radiological contrast agents such as TELEPAQUE™ (iopanoic acid) and ORAGRAFIN™ (sodium ipodate); estrogens or congugated estrogens such as ESTRACE™ (estradiol), ESTINYL™ (ethinyl estradiol), PREMARIN™, ESTRATAB™, ORTHO-EST™, OGEN™ and estropipate (estrone), ESTROVIS™ (quinestrol), ESTRADERM™ (estradiol), DELESTROGEN™ and VALERGEN™ (estradiol valerate), DEPO-ESTRADIOL CYPIONATE™ and ESTROJECT LA™ (estradiol cypionate); antiestrogens such as NOLVADEX™ (tamoxifen), SEROPHENE™ and CLOMID™ (clomiphene); progestins such as DURALUTIN™ (hydroxyprogesterone caproate), MPA™ and DEPO-PROVERA™ (medroxyprogesterone acetate), PROVERA™ and CYCRIN™ (MPA), MEGACE™ (megestrol acetate), NORLUTIN™ (norethindrone), and NORLUTATE™ and AYGESTIN™ (norethindrone acetate); progesterone implants such as NORPLANT SYSTEM™ (subdermal implants of norgestrel); antiprogestins such as RU 486™ (mifepristone); hormonal contraceptives such as ENOVID™ (norethynodrel plus mestranol), PROGESTASERT™ (intrauterine device that releases progesterone), LOESTRIN™, BREVICON™, MODICON™, GENORA™, NELONA™, NORINYL™, OVACON-35™ and OVACON-50™ (ethinyl estradiol/norethindrone), LEVLEN™, NORDETTE™, TRI-LEVLEN™ and TRIPHASIL-21™ (ethinyl estradiol/levonorgestrel) LO/OVRAL™ and OVRAL™ (ethinyl estradiol/norgestrel), DEMULEN™ (ethinyl estradiol/ethynodiol diacetate), NORINYL™, ORTHO-NOVUM™, NORETHIN™, GENORA™, and NELOVA™ (norethindrone/mestranol), DESOGEN™ and ORTHO-CEPT™ (ethinyl estradiol/desogestrel), ORTHO-CYCLEN™ and ORTHO-TRICYCLEN™ (ethinyl estradiol/norgestimate), MICRONOR™ and NOR-QD™ (norethindrone), and OVRETTE™ (norgestrel); testosterone esters such as methenolone acetate and testosterone undecanoate; parenteral and oral androgens such as TESTOJECT-50™ (testosterone), TESTEX™ (testosterone propionate), DELATESTRYL™ (testosterone enanthate), DEPO-TESTOSTERONE™ (testosterone cypionate), DANOCRINE™ (danazol), HALOTESTIN™ (fluoxymesterone), ORETON METHYL™, TESTRED™ and VIRILON™ (methyltestosterone), and OXANDRIN™ (oxandrolone); testosterone transdermal systems such as TESTODERM™; androgen receptor antagonist and 5-alpha-reductase inhibitors such as ANDROCUR™ (cyproterone acetate), EULEXIN™ (flutamide), and PROSCAR™ (finasteride); adrenocorticotropic hormone preparations such as CORTROSYN™ (cosyntropin); adrenocortical steroids and their synthetic analogs such as ACLOVATE™ (alclometasone dipropionate), CYCLOCORT™ (amcinonide), BECLOVENT™ and VANCERIL™ (beclomethasone dipropionate), CELESTONE™ (betamethasone), BENISONE™ and UTICORT™ (betamethasone benzoate), DIPROSONE™ (betamethasone dipropionate), CELESTONE PHOSPHATE™ (betamethasone sodium phosphate), CELESTONE SOLUSPAN™ (betamethasone sodium phosphate and acetate), BETA-VAL™ and VALISONE™ (betamethasone valerate), TEMOVATE™ (clobetasol propionate), CLODERM™ (clocortolone pivalate), CORTEF™ and HYDROCORTONE™ (cortisol (hydrocortisone)), HYDROCORTONE ACETATE™ (cortisol (hydrocortisone) acetate), LOCOID™ (cortisol (hydrocortisone) butyrate), HYDROCORTONE PHOSPHATE™ (cortisol (hydrocortisone) sodium phosphate), A-HYDROCORT™ and SOLU CORTEF™ (cortisol (hydrocortisone) sodium succinate), WESTCORT™ (cortisol (hydrocortisone) valerate), CORTISONE ACETATE™ (cortisone acetate), DESOWEN™ and TRIDESILON™ (desonide), TOPICORT™ (desoximetasone), DECADRON™ (dexamethasone), DECADRON LA™ (dexamethasone acetate), DECADRON PHOSPHATE™ and HEXADROL PHOSPHATE™ (dexamethasone sodium phosphate), FLORONE™ and MAXIFLOR™ (diflorasone diacetate), FLORINEF ACETATE™ (fludrocortisone acetate), AEROBID™ and NASALIDE™ (flunisolide), FLUONID™ and SYNALAR™ (fluocinolone acetonide), LIDEX™ (fluocinonide), FLUOR-OP™ and FML™ (fluorometholone), CORDRAN™ (flurandrenolide), HALOG™ (halcinonide), HMS LIZUIFILM™ (medrysone), MEDROL™ (methylprednisolone), DEPO-MEDROL™ and MEDROL ACETATE™ (methylprednisone acetate), A-METHAPRED™ and SOLUMEDROL™ (methylprednisolone sodium succinate), ELOCON™ (mometasone furoate), HALDRONE™ (paramethasone acetate), DELTA-CORTEF™ (prednisolone), ECONOPRED™ (prednisolone acetate), HYDELTRASOL™ (prednisolone sodium phosphate), HYDELTRA-T.B.A™ (prednisolone tebutate), DELTASONE™ (prednisone), ARISTOCORT™ and KENACORT™ (triamcinolone), KENALOG™ (triamcinolone acetonide), ARISTOCORT™ and KENACORT DIACETATE™ (triamcinolone diacetate), and ARISTOSPAN™ (triamcinolone hexacetonide); inhibitors of biosynthesis and action of adrenocortical steroids such as CYTADREN™ (aminoglutethimide), NIZORAL™ (ketoconazole), MODRASTANE™ (trilostane), and METOPIRONE™ (metyrapone); bovine, porcine or human insulin or mixtures thereof; insulin analogs; recombinant human insulin such as HUMULIN™ and NOVOLIN™; oral hypoglycemic agents such as ORAMIDE™ and ORINASE™ (tolbutamide), DIABINESE™ (chlorpropamide), TOLAMIDE™ and TOLINASE™ (tolazamide), DYMELOR™ (acetohexamide), glibenclamide, MICRONASE™, DIBETA™ and GLYNASE™ (glyburide), GLUCOTROL™ (glipizide), and DIAMICRON™ (gliclazide), GLUCOPHAGE™ (metformin), ciglitazone, pioglitazone, and alpha-glucosidase inhibitors; bovine or porcine glucagon; somatostatins such as SANDOSTATIN™ (octreotide); and diazoxides such as PROGLYCEM™ (diazoxide).

[1065] In one embodiment, the Therapeutics of the invention are administered in combination with treatments for uterine motility disorders. Treatments for uterine motility disorders include, but are not limited to, estrogen drugs such as conjugated estrogens (e.g., PREMARIN® and ESTRATAB®), estradiols (e.g., CLIMARA® and ALORA®), estropipate, and chlorotrianisene; progestin drugs (e.g., AMEN® (medroxyprogesterone), MICRONOR® (norethidrone acetate), PROMETRIUM® progesterone, and megestrol acetate); and estrogen/progesterone combination therapies such as, for example, conjugated estrogens/medroxyprogesterone (e.g., PREMPRO® and PREMPHASE®) and norethindrone acetate/ethinyl estsradiol (e.g., FEMHRT®).

[1066] In an additional embodiment, the Therapeutics of the invention are administered in combination with drugs effective in treating iron deficiency and hypochromic anemias, including but not limited to, ferrous sulfate (iron sulfate, FEOSOL™), ferrous fumarate (e.g., FEOSTAT™), ferrous gluconate (e.g., FERGON™), polysaccharide-iron complex (e.g., NIFEREX™), iron dextran injection (e.g., INFED™), cupric sulfate, pyroxidine, riboflavin, Vitamin B₁₂, cyancobalamin injection (e.g., REDISOL™, RUBRAMIN PC™), hydroxocobalamin, folic acid (e.g., FOLVITE™), leucovorin (folinic acid, 5-CHOH4PteGlu, citrovorum factor) or WELLCOVORIN (Calcium salt of leucovorin), transferrin or ferritin.

[1067] In certain embodiments, the Therapeutics of the invention are administered in combination with agents used to treat psychiatric disorders. Psychiatric drugs that may be administered with the Therapeutics of the invention include, but are not limited to, antipsychotic agents (e.g., chlorpromazine, chlorprothixene, clozapine, fluphenazine, haloperidol, loxapine, mesoridazine, molindone, olanzapine, perphenazine, pimozide, quetiapine, risperidone, thioridazine, thiothixene, trifluoperazine, and triflupromazine), antimanic agents (e.g., carbamazepine, divalproex sodium, lithium carbonate, and lithium citrate), antidepressants (e.g., amitriptyline, amoxapine, bupropion, citalopram, clomipramine, desipramine, doxepin, fluvoxamine, fluoxetine, imipramine, isocarboxazid, maprotiline, mirtazapine, nefazodone, nortriptyline, paroxetine, phenelzine, protriptyline, sertraline, tranylcypromine, trazodone, trimipramine, and venlafaxine), antianxiety agents (e.g., alprazolam, buspirone, chlordiazepoxide, clorazepate, diazepam, halazepam, lorazepam, oxazepam, and prazepam), and stimulants (e.g., d-amphetamine, methylphenidate, and pemoline).

[1068] In other embodiments, the Therapeutics of the invention are administered in combination with agents used to treat neurological disorders. Neurological agents that may be administered with the Therapeutics of the invention include, but are not limited to, antiepileptic agents (e.g., carbamazepine, clonazepam, ethosuximide, phenobarbital, phenytoin, primidone, valproic acid, divalproex sodium, felbamate, gabapentin, lamotrigine, levetiracetam, oxcarbazepine, tiagabine, topiramate, zonisamide, diazepam, lorazepam, and clonazepam), antiparkinsonian agents (e.g., levodopa/carbidopa, selegiline, amantidine, bromocriptine, pergolide, ropinirole, pramipexole, benztropine; biperiden; ethopropazine; procyclidine; trihexyphenidyl, tolcapone), and ALS therapeutics (e.g. riluzole).

[1069] In another embodiment, Therapeutics of the invention are administered in combination with vasodilating agents and/or calcium channel blocking agents. Vasodilating agents that may be administered with the Therapeutics of the invention include, but are not limited to, Angiotensin Converting Enzyme (ACE) inhibitors (e.g., papaverine, isoxsuprine, benazepril, captopril, cilazapril, enalapril, enalaprilat, fosinopril, lisinopril, moexipril, perindopril, quinapril, ramipril, spirapril, trandolapril, and nylidrin), and nitrates (e.g., isosorbide dinitrate, isosorbide mononitrate, and nitroglycerin). Examples of calcium channel blocking agents that may be administered in combination with the Therapeutics of the invention include, but are not limited to amlodipine, bepridil, diltiazem, felodipine, flunarizine, isradipine, nicardipine, nifedipine, nimodipine, and verapamil.

[1070] In additional embodiments, the Therapeutics of the invention are administered in combination with other therapeutic or prophylactic regimens, such as, for example, radiation therapy.

### Example 14

[1071] Method of Treating Decreased Levels of the Polypeptide

[1072] The present invention relates to a method for treating an individual in need of an increased level of a polypeptide of the invention in the body comprising administering to such an individual a composition comprising a therapeutically effective amount of an agonist of the invention (including polypeptides of the invention). Moreover, it will be appreciated that conditions caused by a decrease in the standard or normal expression level of a polypeptide of the present invention in an individual can be treated by administering the agonist or antagonist of the present invention. Thus, the invention also provides a method of treatment of an individual in need of an increased level of the polypeptide comprising administering to such an individual a Therapeutic comprising an amount of the agonist or antagonist to increase the activity level of the polypeptide in such an individual.

[1073] For example, a patient with decreased levels of a polypeptide receives a daily dose 0.1-100 ug/kg of the agonist or antagonist for six consecutive days. The exact details of the dosing scheme, based on administration and formulation, are provided in Example 13.

### Example 15

[1074] Method of Treating Increased Levels of the Polypeptide

[1075] The present invention also relates to a method of treating an individual in need of a decreased level of a polypeptide of the invention in the body comprising administering to such an individual a composition comprising a therapeutically effective amount of an antagonist of the invention (including polypeptides and antibodies of the invention).

[1076] In one example, antisense technology is used to inhibit production of a polypeptide of the present invention. This technology is one example of a method of decreasing levels of a polypeptide, due to a variety of etiologies, such as cancer.

[1077] For example, a patient diagnosed with abnormally increased levels of a polypeptide is administered intravenously antisense polynucleotides at 0.5, 1.0, 1.5, 2.0 and 3.0 mg/kg day for 21 days. This treatment is repeated after a 7-day rest period if the treatment was well tolerated. The formulation of the antisense polynucleotide is provided in Example 13.

### Example 16

[1078] Method of Treatment Using Gene Therapy-Ex Vivo

[1079] One method of gene therapy transplants fibroblasts, which are capable of expressing a polypeptide, onto a patient. Generally, fibroblasts are obtained from a subject by skin biopsy. The resulting tissue is placed in tissue-culture medium and separated into small pieces. Small chunks of the tissue are placed on a wet surface of a tissue culture flask, approximately ten pieces are placed in each flask. The flask is turned upside down, closed tight and left at room temperature over night. After 24 hours at room temperature, the flask is inverted and the chunks of tissue remain fixed to the bottom of the flask and fresh media (e.g., Ham's F12 media, with 10% FBS, penicillin and streptomycin) is added. The flasks are then incubated at 37 degree C. for approximately one week.

[1080] At this time, fresh media is added and subsequently changed every several days. After an additional two weeks in culture, a monolayer of fibroblasts emerge. The monolayer is trypsinized and scaled into larger flasks.

[1081] pMV-7 (Kirschmeier, P. T. et al., DNA, 7:219-25 (1988)), flanked by the long terminal repeats of the Moloney murine sarcoma virus, is digested with EcoRI and HindIII and subsequently treated with calf intestinal phosphatase. The linear vector is fractionated on agarose gel and purified, using glass beads.

[1082] The cDNA encoding a polypeptide of the present invention can be amplified using PCR primers which correspond to the 5′ and 3′ end sequences respectively as set forth in Example 1 using primers and having appropriate restriction sites and initiation/stop codons, if necessary. Preferably, the 5′ primer contains an EcoRI site and the 3′ primer includes a HindIII site. Equal quantities of the Moloney murine sarcoma virus linear backbone and the amplified EcoRI and HindIII fragment are added together, in the presence of T4 DNA ligase. The resulting mixture is maintained under conditions appropriate for ligation of the two fragments. The ligation mixture is then used to transform bacteria HB101, which are then plated onto agar containing kanamycin for the purpose of confirming that the vector has the gene of interest properly inserted.

[1083] The amphotropic pA317 or GP+am12 packaging cells are grown in tissue culture to confluent density in Dulbecco's Modified Eagles Medium (DMEM) with 10% calf serum (CS), penicillin and streptomycin. The MSV vector containing the gene is then added to the media and the packaging cells transduced with the vector. The packaging cells now produce infectious viral particles containing the gene (the packaging cells are now referred to as producer cells).

[1084] Fresh media is added to the transduced producer cells, and subsequently, the media is harvested from a 10 cm plate of confluent producer cells. The spent media, containing the infectious viral particles, is filtered through a millipore filter to remove detached producer cells and this media is then used to infect fibroblast cells. Media is removed from a sub-confluent plate of fibroblasts and quickly replaced with the media from the producer cells. This media is removed and replaced with fresh media. If the titer of virus is high, then virtually all fibroblasts will be infected and no selection is required. If the titer is very low, then it is necessary to use a retroviral vector that has a selectable marker, such as neo or his. Once the fibroblasts have been efficiently infected, the fibroblasts are analyzed to determine whether protein is produced.

[1085] The engineered fibroblasts are then transplanted onto the host, either alone or after having been grown to confluence on cytodex 3 microcarrier beads.

### Example 17

[1086] Gene Therapy Using Endogenous Genes Corresponding to Polynucleotides of the Invention

[1087] Another method of gene therapy according to the present invention involves operably associating the endogenous polynucleotide sequence of the invention with a promoter via homologous recombination as described, for example, in U.S. Pat. No.: 5,641,670, issued Jun. 24, 1997; International Publication NO: WO 96/29411, published Sep. 26, 1996; International Publication NO: WO 94/12650, published Aug. 4, 1994; Koller et al., Proc. Natl. Acad. Sci. USA, 86:8932-8935 (1989); and Zijlstra et al., Nature, 342:435-438 (1989). This method involves the activation of a gene which is present in the target cells, but which is not expressed in the cells, or is expressed at a lower level than desired.

[1088] Polynucleotide constructs are made which contain a promoter and targeting sequences, which are homologous to the 5′ non-coding sequence of endogenous polynucleotide sequence, flanking the promoter. The targeting sequence will be sufficiently near the 5′ end of the polynucleotide sequence so the promoter will be operably linked to the endogenous sequence upon homologous recombination. The promoter and the targeting sequences can be amplified using PCR. Preferably, the amplified promoter contains distinct restriction enzyme sites on the 5′ and 3′ ends. Preferably, the 3′ end of the first targeting sequence contains the same restriction enzyme site as the 5′ end of the amplified promoter and the 5′ end of the second targeting sequence contains the same restriction site as the 3′ end of the amplified promoter.

[1089] The amplified promoter and the amplified targeting sequences are digested with the appropriate restriction enzymes and subsequently treated with calf intestinal phosphatase. The digested promoter and digested targeting sequences are added together in the presence of T4 DNA ligase. The resulting mixture is maintained under conditions appropriate for ligation of the two fragments. The construct is size fractionated on an agarose gel, then purified by phenol extraction and ethanol precipitation.

[1090] In this Example, the polynucleotide constructs are administered as naked polynucleotides via electroporation. However, the polynucleotide constructs may also be administered with transfection-facilitating agents, such as liposomes, viral sequences, viral particles, precipitating agents, etc. Such methods of delivery are known in the art.

[1091] Once the cells are transfected, homologous recombination will take place which results in the promoter being operably linked to the endogenous polynucleotide sequence. This results in the expression of polynucleotide corresponding to the polynucleotide in the cell. Expression may be detected by immunological staining, or any other method known in the art.

[1092] Fibroblasts are obtained from a subject by skin biopsy. The resulting tissue is placed in DMEM+10% fetal calf serum. Exponentially growing or early stationary phase fibroblasts are trypsinized and rinsed from the plastic surface with nutrient medium. An aliquot of the cell suspension is removed for counting, and the remaining cells are subjected to centrifugation. The supernatant is aspirated and the pellet is resuspended in 5 ml of electroporation buffer (20 mM HEPES pH 7.3, 137 mM NaCl, 5 mM KCl, 0.7 mM Na₂ HPO₄, 6 mM dextrose). The cells are recentrifuged, the supernatant aspirated, and the cells resuspended in electroporation buffer containing 1 mg/ml acetylated bovine serum albumin. The final cell suspension contains approximately 3×10⁶ cells/ml. Electroporation should be performed immediately following resuspension.

[1093] Plasmid DNA is prepared according to standard techniques. For example, to construct a plasmid for targeting to the locus corresponding to the polynucleotide of the invention, plasmid pUC18 (MBI Fermentas, Amherst, N.Y.) is digested with HindIII. The CMV promoter is amplified by PCR with an XbaI site on the 5′ end and a BamHI site on the 3′ end. Two non-coding sequences are amplified via PCR: one non-coding sequence (fragment 1) is amplified with a HindIII site at the 5′ end and an Xba site at the 3′ end; the other non-coding sequence (fragment 2) is amplified with a BamHI site at the 5′ end and a HindIII site at the 3′ end. The CMV promoter and the fragments (1 and 2) are digested with the appropriate enzymes (CMV promoter—XbaI and BamHI; fragment 1—XbaI; fragment 2—BamHI) and ligated together. The resulting ligation product is digested with HindIII, and ligated with the HindIII-digested pUC18 plasmid.

[1094] Plasmid DNA is added to a sterile cuvette with a 0.4 cm electrode gap (Bio-Rad). The final DNA concentration is generally at least 120 μg/ml. 0.5 ml of the cell suspension (containing approximately 1.5.×10⁶ cells) is then added to the cuvette, and the cell suspension and DNA solutions are gently mixed. Electroporation is performed with a Gene-Pulser apparatus (Bio-Rad). Capacitance and voltage are set at 960 μF and 250-300 V, respectively. As voltage increases, cell survival decreases, but the percentage of surviving cells that stably incorporate the introduced DNA into their genome increases dramatically. Given these parameters, a pulse time of approximately 14-20 mSec should be observed.

[1095] Electroporated cells are maintained at room temperature for approximately 5 min, and the contents of the cuvette are then gently removed with a sterile transfer pipette. The cells are added directly to 10 ml of prewarmed nutrient media (DMEM with 15% calf serum) in a 10 cm dish and incubated at 37 degree C. The following day, the media is aspirated and replaced with 10 ml of fresh media and incubated for a further 16-24 hours.

[1096] The engineered fibroblasts are then injected into the host, either alone or after having been grown to confluence on cytodex 3 microcarrier beads. The fibroblasts now produce the protein product. The fibroblasts can then be introduced into a patient as described above.

### Example 18

[1097] Method of Treatment Using Gene Therapy—In vivo

[1098] Another aspect of the present invention is using in vivo gene therapy methods to treat disorders, diseases and conditions. The gene therapy method relates to the introduction of naked nucleic acid (DNA, RNA, and antisense DNA or RNA) sequences into an animal to increase or decrease the expression of the polypeptide. The polynucleotide of the present invention may be operatively linked to (i.e., associated with) a promoter or any other genetic elements necessary for the expression of the polypeptide by the target tissue. Such gene therapy and delivery techniques and methods are known in the art, see, for example, WO90/11092, WO98/11779; U.S. Pat. Nos. 5,693,622, 5,705,151, 5,580,859; Tabata et al., Cardiovasc. Res. 35(3):470-479 (1997); Chao et al., Pharmacol. Res. 35(6):517-522 (1997); Wolff, Neuromuscul. Disord. 7(5):314-318 (1997); Schwartz et al., Gene Ther. 3(5):405-411 (1996); Tsurumi et al., Circulation 94(12):3281-3290 (1996) (incorporated herein by reference).

[1099] The polynucleotide constructs may be delivered by any method that delivers injectable materials to the cells of an animal, such as, injection into the interstitial space of tissues (heart, muscle, skin, lung, liver, intestine and the like). The polynucleotide constructs can be delivered in a pharmaceutically acceptable liquid or aqueous carrier.

[1100] The term “naked” polynucleotide, DNA or RNA, refers to sequences that are free from any delivery vehicle that acts to assist, promote, or facilitate entry into the cell, including viral sequences, viral particles, liposome formulations, lipofectin or precipitating agents and the like. However, the polynucleotides of the present invention may also be delivered in liposome formulations (such as those taught in Feigner P. L. et al. (1995) Ann. NY Acad. Sci. 772:126-139 and Abdallah B. et al. (1995) Biol. Cell 85(1):1-7) which can be prepared by methods well known to those skilled in the art.

[1101] The polynucleotide vector constructs used in the gene therapy method are preferably constructs that will not integrate into the host genome nor will they contain sequences that allow for replication. Any strong promoter known to those skilled in the art can be used for driving the expression of DNA. Unlike other gene therapy techniques, one major advantage of introducing naked nucleic acid sequences into target cells is the transitory nature of the polynucleotide synthesis in the cells. Studies have shown that non-replicating DNA sequences can be introduced into cells to provide production of the desired polypeptide for periods of up to six months.

[1102] The polynucleotide construct can be delivered to the interstitial space of tissues within an animal, including muscle, skin, brain, lung, liver, spleen, bone marrow, thymus, heart, lymph, blood, bone, cartilage, pancreas, kidney, gall bladder, stomach, intestine, testis, ovary, uterus, rectum, nervous system, eye, gland, and connective tissue. Interstitial space of the tissues comprises the intercellular fluid, mucopolysaccharide matrix among the reticular fibers of organ tissues, elastic fibers in the walls of vessels or chambers, collagen fibers of fibrous tissues, or that same matrix within connective tissue ensheathing muscle cells or in the lacunae of bone. It is similarly the space occupied by the plasma of the circulation and the lymph fluid of the lymphatic channels. Delivery to the interstitial space of muscle tissue is preferred for the reasons discussed below. They may be conveniently delivered by injection into the tissues comprising these cells. They are preferably delivered to and expressed in persistent, non-dividing cells which are differentiated, although delivery and expression may be achieved in non-differentiated or less completely differentiated cells, such as, for example, stem cells of blood or skin fibroblasts. In vivo muscle cells are particularly competent in their ability to take up and express polynucleotides.

[1103] For the naked polynucleotide injection, an effective dosage amount of DNA or RNA will be in the range of from about 0.05 g/kg body weight to about 50 mg/kg body weight. Preferably the dosage will be from about 0.005 mg/kg to about 20 mg/kg and more preferably from about 0.05 mg/kg to about 5 mg/kg. Of course, as the artisan of ordinary skill will appreciate, this dosage will vary according to the tissue site of injection. The appropriate and effective dosage of nucleic acid sequence can readily be determined by those of ordinary skill in the art and may depend on the condition being treated and the route of administration. The preferred route of administration is by the parenteral route of injection into the interstitial space of tissues. However, other parenteral routes may also be used, such as, inhalation of an aerosol formulation particularly for delivery to lungs or bronchial tissues, throat or mucous membranes of the nose. In addition, naked polynucleotide constructs can be delivered to arteries during angioplasty by the catheter used in the procedure.

[1104] The dose response effects of injected polynucleotide in muscle in vivo is determined as follows. Suitable template DNA for production of mRNA coding for polypeptide of the present invention is prepared in accordance with a standard recombinant DNA methodology. The template DNA, which may be either circular or linear, is either used as naked DNA or complexed with liposomes. The quadriceps muscles of mice are then injected with various amounts of the template DNA.

[1105] Five to six week old female and male Balb/C mice are anesthetized by intraperitoneal injection with 0.3 ml of 2.5% Avertin. A 1.5 cm incision is made on the anterior thigh, and the quadriceps muscle is directly visualized. The template DNA is injected in 0.1 ml of carrier in a 1 cc syringe through a 27 gauge needle over one minute, approximately 0.5 cm from the distal insertion site of the muscle into the knee and about 0.2 cm deep. A suture is placed over the injection site for future localization, and the skin is closed with stainless steel clips.

[1106] After an appropriate incubation time (e.g., 7 days) muscle extracts are prepared by excising the entire quadriceps. Every fifth 15 um cross-section of the individual quadriceps muscles is histochemically stained for protein expression. A time course for protein expression may be done in a similar fashion except that quadriceps from different mice are harvested at different times. Persistence of DNA in muscle following injection may be determined by Southern blot analysis after preparing total cellular DNA and HIRT supernatants from injected and control mice. The results of the above experimentation in mice can be used to extrapolate proper dosages and other treatment parameters in humans and other animals using naked DNA.

### Example 19

[1107] Transgenic Animals

[1108] The polypeptides of the invention can also be expressed in transgenic animals. Animals of any species, including, but not limited to, mice, rats, rabbits, hamsters, guinea pigs, pigs, micro-pigs, goats, sheep, cows and non-human primates, e.g., baboons, monkeys, and chimpanzees may be used to generate transgenic animals. In a specific embodiment, techniques described herein or otherwise known in the art, are used to express polypeptides of the invention in humans, as part of a gene therapy protocol.

[1109] Any technique known in the art may be used to introduce the transgene (i.e., polynucleotides of the invention) into animals to produce the founder lines of transgenic animals. Such techniques include, but are not limited to, pronuclear microinjection (Paterson et al., Appl. Microbiol. Biotechnol. 40:691-698 (1994); Carver et al., Biotechnology (NY) 11: 1263-1270 (1993); Wright et al., Biotechnology (NY) 9:830-834 (1991); and Hoppe et al., U.S. Pat. No. 4,873,191 (1989)); retrovirus mediated gene transfer into germ lines (Van der Putten et al., Proc. Natl. Acad. Sci., USA 82:6148-6152 (1985)), blastocysts or embryos; gene targeting in embryonic stem cells (Thompson et al., Cell 56:313-321 (1989)); electroporation of cells or embryos (Lo, 1983, Mol Cell. Biol. 3:1803-1814 (1983)); introduction of the polynucleotides of the invention using a gene gun (see, e.g., Ulmer et al., Science 259:1745 (1993); introducing nucleic acid constructs into embryonic pleuripotent stem cells and transferring the stem cells back into the blastocyst; and sperm-mediated gene transfer (Lavitrano et al., Cell 57:717-723 (1989); etc. For a review of such techniques, see Gordon, “Transgenic Animals,” Intl. Rev. Cytol. 115:171-229 (1989), which is incorporated by reference herein in its entirety.

[1110] Any technique known in the art may be used to produce transgenic clones containing polynucleotides of the invention, for example, nuclear transfer into enucleated oocytes of nuclei from cultured embryonic, fetal, or adult cells induced to quiescence (Campell et al., Nature 380:64-66 (1996); Wilmut et al., Nature 385:810-813 (1997)).

[1111] The present invention provides for transgenic animals that carry the transgene in all their cells, as well as animals which carry the transgene in some, but not all their cells, i.e., mosaic animals or chimeric. The transgene may be integrated as a single transgene or as multiple copies such as in concatamers, e.g., head-to-head tandems or head-to-tail tandems. The transgene may also be selectively introduced into and activated in a particular cell type by following, for example, the teaching of Lasko et al. (Lasko et al., Proc. Natl. Acad. Sci. USA 89:6232-6236 (1992)). The regulatory sequences required for such a cell-type specific activation will depend upon the particular cell type of interest, and will be apparent to those of skill in the art. When it is desired that the polynucleotide transgene be integrated into the chromosomal site of the endogenous gene, gene targeting is preferred. Briefly, when such a technique is to be utilized, vectors containing some nucleotide sequences homologous to the endogenous gene are designed for the purpose of integrating, via homologous recombination with chromosomal sequences, into and disrupting the function of the nucleotide sequence of the endogenous gene. The transgene may also be selectively introduced into a particular cell type, thus inactivating the endogenous gene in only that cell type, by following, for example, the teaching of Gu et al. (Gu et al., Science 265:103-106 (1994)). The regulatory sequences required for such a cell-type specific inactivation will depend upon the particular cell type of interest, and will be apparent to those of skill in the art.

[1112] Once transgenic animals have been generated, the expression of the recombinant gene may be assayed utilizing standard techniques. Initial screening may be accomplished by Southern blot analysis or PCR techniques to analyze animal tissues to verify that integration of the transgene has taken place. The level of mRNA expression of the transgene in the tissues of the transgenic animals may also be assessed using techniques which include, but are not limited to, Northern blot analysis of tissue samples obtained from the animal, in situ hybridization analysis, and reverse transcriptase-PCR (rt-PCR). Samples of transgenic gene-expressing tissue may also be evaluated immunocytochemically or immunohistochemically using antibodies specific for the transgene product.

[1113] Once the founder animals are produced, they may be bred, inbred, outbred, or crossbred to produce colonies of the particular animal. Examples of such breeding strategies include, but are not limited to: outbreeding of founder animals with more than one integration site in order to establish separate lines; inbreeding of separate lines in order to produce compound transgenics that express the transgene at higher levels because of the effects of additive expression of each transgene; crossing of heterozygous transgenic animals to produce animals homozygous for a given integration site in order to both augment expression and eliminate the need for screening of animals by DNA analysis; crossing of separate homozygous lines to produce compound heterozygous or homozygous lines; and breeding to place the transgene on a distinct background that is appropriate for an experimental model of interest.

[1114] Transgenic animals of the invention have uses which include, but are not limited to, animal model systems useful in elaborating the biological function of polypeptides of the present invention, studying conditions and/or disorders associated with aberrant expression, and in screening for compounds effective in ameliorating such conditions and/or disorders.

### Example 20

[1115] Knock-Out Animals

[1116] Endogenous gene expression can also be reduced by inactivating or “knocking out” the gene and/or its promoter using targeted homologous recombination. (See e.g., Smithies et al., Nature 317:230-234 (1985); Thomas & Capecchi, Cell 51:503-512 (1987); Thompson et al., Cell 5:313-321 (1989); each of which is incorporated by reference herein in its entirety.) For example, a mutant, non-functional polynucleotide of the invention (or a completely unrelated DNA sequence) flanked by DNA homologous to the endogenous polynucleotide sequence (either the coding regions or regulatory regions of the gene) can be used, with or without a selectable marker and/or a negative selectable marker, to transfect cells that express polypeptides of the invention in vivo. In another embodiment, techniques known in the art are used to generate knockouts in cells that contain, but do not express the gene of interest. Insertion of the DNA construct, via targeted homologous recombination, results in inactivation of the targeted gene. Such approaches are particularly suited in research and agricultural fields where modifications to embryonic stem cells can be used to generate animal offspring with an inactive targeted gene (e.g., see Thomas & Capecchi 1987 and Thompson 1989, supra). However this approach can be routinely adapted for use in humans provided the recombinant DNA constructs are directly administered or targeted to the required site in vivo using appropriate viral vectors that will be apparent to those of skill in the art.

[1117] In further embodiments of the invention, cells that are genetically engineered to express the polypeptides of the invention, or alternatively, that are genetically engineered not to express the polypeptides of the invention (e.g., knockouts) are administered to a patient in vivo. Such cells may be obtained from the patient (i.e., animal, including human) or an MHC compatible donor and can include, but are not limited to fibroblasts, bone marrow cells, blood cells (e.g., lymphocytes), adipocytes, muscle cells, endothelial cells etc. The cells are genetically engineered in vitro using recombinant DNA techniques to introduce the coding sequence of polypeptides of the invention into the cells, or alternatively, to disrupt the coding sequence and/or endogenous regulatory sequence associated with the polypeptides of the invention, e.g., by transduction (using viral vectors, and preferably vectors that integrate the transgene into the cell genome) or transfection procedures, including, but not limited to, the use of plasmids, cosmids, YACs, naked DNA, electroporation, liposomes, etc. The coding sequence of the polypeptides of the invention can be placed under the control of a strong constitutive or inducible promoter or promoter/enhancer to achieve expression, and preferably secretion, of the polypeptides of the invention. The engineered cells which express and preferably secrete the polypeptides of the invention can be introduced into the patient systemically, e.g., in the circulation, or intraperitoneally.

[1118] Alternatively, the cells can be incorporated into a matrix and implanted in the body, e.g., genetically engineered fibroblasts can be implanted as part of a skin graft; genetically engineered endothelial cells can be implanted as part of a lymphatic or vascular graft. (See, for example, Anderson et al. U.S. Pat. No. 5,399,349; and Mulligan & Wilson, U.S. Pat. No. 5,460,959 each of which is incorporated by reference herein in its entirety).

[1119] When the cells to be administered are non-autologous or non-MHC compatible cells, they can be administered using well known techniques which prevent the development of a host immune response against the introduced cells. For example, the cells may be introduced in an encapsulated form which, while allowing for an exchange of components with the immediate extracellular environment, does not allow the introduced cells to be recognized by the host immune system.

[1120] Transgenic and “knock-out” animals of the invention have uses which include, but are not limited to, animal model systems useful in elaborating the biological function of polypeptides of the present invention, studying conditions and/or disorders associated with aberrant expression, and in screening for compounds effective in ameliorating such conditions and/or disorders.

### Example 21

[1121] Assays Detecting Stimulation or Inhibition of B cell Proliferation and Differentiation

[1122] Generation of functional humoral immune responses requires both soluble and cognate signaling between B-lineage cells and their microenvironment. Signals may impart a positive stimulus that allows a B-lineage cell to continue its programmed development, or a negative stimulus that instructs the cell to arrest its current developmental pathway. To date, numerous stimulatory and inhibitory signals have been found to influence B cell responsiveness including IL-2, IL-4, IL-5, IL-6, IL-7, IL10, IL-13, IL-14 and IL-15. Interestingly, these signals are by themselves weak effectors but can, in combination with various co-stimulatory proteins, induce activation, proliferation, differentiation, homing, tolerance and death among B cell populations.

[1123] One of the best studied classes of B-cell co-stimulatory proteins is the TNF-superfamily. Within this family CD40, CD27, and CD30 along with their respective ligands CD154, CD70, and CD153 have been found to regulate a variety of immune responses. Assays which allow for the detection and/or observation of the proliferation and differentiation of these B-cell populations and their precursors are valuable tools in determining the effects various proteins may have on these B-cell populations in terms of proliferation and differentiation. Listed below are two assays designed to allow for the detection of the differentiation, proliferation, or inhibition of B-cell populations and their precursors.

[1124] In vitro Assay-Agonists or antagonists of the invention can be assessed for its ability to induce activation, proliferation, differentiation or inhibition and/or death in B-cell populations and their precursors. The activity of the agonists or antagonists of the invention on purified human tonsillar B cells, measured qualitatively over the dose range from 0.1 to 10,000 ng/mL, is assessed in a standard B-lymphocyte co-stimulation assay in which purified tonsillar B cells are cultured in the presence of either formalin-fixed Staphylococcus aureus Cowan I (SAC) or immobilized anti-human IgM antibody as the priming agent. Second signals such as IL-2 and IL-15 synergize with SAC and IgM crosslinking to elicit B cell proliferation as measured by tritiated-thymidine incorporation. Novel synergizing agents can be readily identified using this assay. The assay involves isolating human tonsillar B cells by magnetic bead (MACS) depletion of CD3-positive cells. The resulting cell population is greater than 95% B cells as assessed by expression of CD45R(B220).

[1125] Various dilutions of each sample are placed into individual wells of a 96-well plate to which are added 10⁵ B-cells suspended in culture medium (RPMI 1640 containing 10% FBS, 5×10⁻⁵M 2ME, 100 U/ml penicillin, 10 ug/ml streptomycin, and 10⁻⁵ dilution of SAC) in a total volume of 150 ul. Proliferation or inhibition is quantitated by a 20 h pulse (1 uCi/well) with 3H-thymidine (6.7 Ci/mM) beginning 72 h post factor addition. The positive and negative controls are IL2 and medium respectively.

[1126] In vivo Assay-BALB/c mice are injected (i.p.) twice per day with buffer only, or 2 mg/Kg of agonists or antagonists of the invention, or truncated forms thereof. Mice receive this treatment for 4 consecutive days, at which time they are sacrificed and various tissues and serum collected for analyses. Comparison of H&E sections from normal spleens and spleens treated with agonists or antagonists of the invention identify the results of the activity of the agonists or antagonists on spleen cells, such as the diffusion of peri-arterial lymphatic sheaths, and/or significant increases in the nucleated cellularity of the red pulp regions, which may indicate the activation of the differentiation and proliferation of B-cell populations. Immunohistochemical studies using a B cell marker, anti-CD45R(B220), are used to determine whether any physiological changes to splenic cells, such as splenic disorganization, are due to increased B-cell representation within loosely defined B-cell zones that infiltrate established T-cell regions.

[1127] Flow cytometric analyses of the spleens from mice treated with agonist or antagonist is used to indicate whether the agonists or antagonists specifically increases the proportion of ThB+, CD45R(B220)dull B cells over that which is observed in control mice.

[1128] Likewise, a predicted consequence of increased mature B-cell representation in vivo is a relative increase in serum Ig titers. Accordingly, serum IgM and IgA levels are compared between buffer and agonists or antagonists-treated mice.

[1129] The studies described in this example tested activity of agonists or antagonists of the invention. However, one skilled in the art could easily modify the exemplified studies to test the activity of polynucleotides or polypeptides of the invention (e.g., gene therapy).

### Example 22

[1130] T Cell Proliferation Assay

[1131] A CD3-induced proliferation assay is performed on PBMCs and is measured by the uptake of ³H-thymidine. The assay is performed as follows. Ninety-six well plates are coated with 100 μl/well of mAb to CD3 (HIT3a, Pharmingen) or isotype-matched control mAb (B33.1) overnight at 4 degrees C. (1 μg/ml in 0.05M bicarbonate buffer, pH 9.5), then washed three times with PBS. PBMC are isolated by F/H gradient centrifugation from human peripheral blood and added to quadruplicate wells (5×10⁴/well) of mAb coated plates in RPMI containing 10% FCS and P/S in the presence of varying concentrations of agonists or antagonists of the invention (total volume 200 ul). Relevant protein buffer and medium alone are controls. After 48 hr. culture at 37 degrees C., plates are spun for 2 min. at 1000 rpm and 100 μl of supernatant is removed and stored −20 degrees C. for measurement of IL-2 (or other cytokines) if effect on proliferation is observed. Wells are supplemented with 100 ul of medium containing 0.5 uCi of ³H-thymidine and cultured at 37 degrees C. for 18-24 hr. Wells are harvested and incorporation of ³H-thymidine used as a measure of proliferation. Anti-CD3 alone is the positive control for proliferation. IL-2 (100 U/ml) is also used as a control which enhances proliferation. Control antibody which does not induce proliferation of T cells is used as the negative control for the effects of agonists or antagonists of the invention.

[1132] The studies described in this example tested activity of agonists or antagonists of the invention. However, one skilled in the art could easily modify the exemplified studies to test the activity of polynucleotides or polypeptides of the invention (e.g., gene therapy).

### Example 23

[1133] Effect of Agonists or Antagonists of the Invention on the Expression of MHC Class II, Costimulatory and Adhesion Molecules and Cell Differentiation of Monocytes and Monocyte-Derived Human Dendritic Cells

[1134] Dendritic cells are generated by the expansion of proliferating precursors found in the peripheral blood: adherent PBMC or elutriated monocytic fractions are cultured for 7-10 days with GM-CSF (50 ng/ml) and IL-4 (20 ng/ml). These dendritic cells have the characteristic phenotype of immature cells (expression of CD1, CD80, CD86, CD40 and MHC class II antigens). Treatment with activating factors, such as TNF-α, causes a rapid change in surface phenotype (increased expression of MHC class I and II, costimulatory and adhesion molecules, downregulation of FCγRII, upregulation of CD83). These changes correlate with increased antigen-presenting capacity and with functional maturation of the dendritic cells.

[1135] FACS analysis of surface antigens is performed as follows. Cells are treated 1-3 days with increasing concentrations of agonist or antagonist of the invention or LPS (positive control), washed with PBS containing 1% BSA and 0.02 mM sodium azide, and then incubated with 1:20 dilution of appropriate FITC- or PE-labeled monoclonal antibodies for 30 minutes at 4 degrees C. After an additional wash, the labeled cells are analyzed by flow cytometry on a FACScan (Becton Dickinson).

[1136] Effect on the production of cytokines. Cytokines generated by dendritic cells, in particular IL-12, are important in the initiation of T-cell dependent immune responses. IL-12 strongly influences the development of Th1 helper T-cell immune response, and induces cytotoxic T and NK cell function. An ELISA is used to measure the IL-12 release as follows. Dendritic cells (10⁶/ml) are treated with increasing concentrations of agonists or antagonists of the invention for 24 hours. LPS (100 ng/ml) is added to the cell culture as positive control. Supernatants from the cell cultures are then collected and analyzed for IL-12 content using commercial ELISA kit (e.g., R & D Systems (Minneapolis, Minn.)). The standard protocols provided with the kits are used.

[1137] Effect on the expression of MHC Class II, costimulatory and adhesion molecules. Three major families of cell surface antigens can be identified on monocytes: adhesion molecules, molecules involved in antigen presentation, and Fc receptor. Modulation of the expression of MHC class II antigens and other costimulatory molecules, such as B7 and ICAM-1, may result in changes in the antigen presenting capacity of monocytes and ability to induce T cell activation. Increased expression of Fc receptors may correlate with improved monocyte cytotoxic activity, cytokine release and phagocytosis.

[1138] FACS analysis is used to examine the surface antigens as follows. Monocytes are treated 1-5 days with increasing concentrations of agonists or antagonists of the invention or LPS (positive control), washed with PBS containing 1% BSA and 0.02 mM sodium azide, and then incubated with 1:20 dilution of appropriate FITC- or PE-labeled monoclonal antibodies for 30 minutes at 4 degrees C. After an additional wash, the labeled cells are analyzed by flow cytometry on a FACScan (Becton Dickinson).

[1139] Monocyte activation and/or increased survival. Assays for molecules that activate (or alternatively, inactivate) monocytes and/or increase monocyte survival (or alternatively, decrease monocyte survival) are known in the art and may routinely be applied to determine whether a molecule of the invention functions as an inhibitor or activator of monocytes. Agonists or antagonists of the invention can be screened using the three assays described below. For each of these assays, Peripheral blood mononuclear cells (PBMC) are purified from single donor leukopacks (American Red Cross, Baltimore, Md.) by centrifugation through a Histopaque gradient (Sigma). Monocytes are isolated from PBMC by counterflow centrifugal elutriation.

[1140] Monocyte Survival Assay. Human peripheral blood monocytes progressively lose viability when cultured in absence of serum or other stimuli. Their death results from internally regulated processes (apoptosis). Addition to the culture of activating factors, such as TNF-alpha dramatically improves cell survival and prevents DNA fragmentation. Propidium iodide (PI) staining is used to measure apoptosis as follows. Monocytes are cultured for 48 hours in polypropylene tubes in serum-free medium (positive control), in the presence of 100 ng/ml TNF-alpha (negative control), and in the presence of varying concentrations of the compound to be tested. Cells are suspended at a concentration of 2×10⁶/ml in PBS containing PI at a final concentration of 5 μg/ml, and then incubated at room temperature for 5 minutes before FACScan analysis. PI uptake has been demonstrated to correlate with DNA fragmentation in this experimental paradigm.

[1141] Effect on cytokine release. An important function of monocytes/macrophages is their regulatory activity on other cellular populations of the immune system through the release of cytokines after stimulation. An ELISA to measure cytokine release is performed as follows. Human monocytes are incubated at a density of 5×10⁵ cells/ml with increasing concentrations of agonists or antagonists of the invention and under the same conditions, but in the absence of agonists or antagonists. For IL-12 production, the cells are primed overnight with IFN (100 U/ml) in the presence of agonist or antagonist of the invention. LPS (10 ng/ml) is then added. Conditioned media are collected after 24 h and kept frozen until use. Measurement of TNF-alpha, IL-10, MCP-1 and IL-8 is then performed using a commercially available ELISA kit (e.g., R & D Systems (Minneapolis, Minn.)) and applying the standard protocols provided with the kit.

[1142] Oxidative burst. Purified monocytes are plated in 96-w plate at 2-1×10⁵ cell/well. Increasing concentrations of agonists or antagonists of the invention are added to the wells in a total volume of 0.2 ml culture medium (RPMI 1640+10% FCS, glutamine and antibiotics). After 3 days incubation, the plates are centrifuged and the medium is removed from the wells. To the macrophage monolayers, 0.2 ml per well of phenol red solution (140 mM NaCl, 10 mM potassium phosphate buffer pH 7.0, 5.5 mM dextrose, 0.56 mM phenol red and 19 U/ml of HRPO) is added, together with the stimulant (200 nM PMA). The plates are incubated at 37° C. for 2 hours and the reaction is stopped by adding 20 μl 1N NaOH per well. The absorbance is read at 610 nm. To calculate the amount of H₂O₂ produced by the macrophages, a standard curve of a H₂O₂ solution of known molarity is performed for each experiment.

[1143] The studies described in this example tested activity of agonists or antagonists of the invention. However, one skilled in the art could easily modify the exemplified studies to test the activity of polynucleotides or polypeptides of the invention (e.g., gene therapy).

### Example 24

[1144] Biological Effects of Agonists or Antagonists of the Invention

[1145] Astrocyte and Neuronal Assays

[1146] Agonists or antagonists of the invention, expressed in Escherichia coli and purified as described above, can be tested for activity in promoting the survival, neurite outgrowth, or phenotypic differentiation of cortical neuronal cells and for inducing the proliferation of glial fibrillary acidic protein immunopositive cells, astrocytes. The selection of cortical cells for the bioassay is based on the prevalent expression of FGF-1 and FGF-2 in cortical structures and on the previously reported enhancement of cortical neuronal survival resulting from FGF-2 treatment. A thymidine incorporation assay, for example, can be used to elucidate an agonist or antagonist of the invention's activity on these cells.

[1147] Moreover, previous reports describing the biological effects of FGF-2 (basic FGF) on cortical or hippocampal neurons in vitro have demonstrated increases in both neuron survival and neurite outgrowth (Walicke et al., “Fibroblast growth factor promotes survival of dissociated hippocampal neurons and enhances neurite extension.” Proc. Natl. Acad. Sci. USA 83:3012-3016. (1986), assay herein incorporated by reference in its entirety). However, reports from experiments done on PC-12 cells suggest that these two responses are not necessarily synonymous and may depend on not only which FGF is being tested but also on which receptor(s) are expressed on the target cells. Using the primary cortical neuronal culture paradigm, the ability of an agonist or antagonist of the invention to induce neurite outgrowth can be compared to the response achieved with FGF-2 using, for example, a thymidine incorporation assay.

[1148] Fibroblast and Endothelial Cell Assays

[1149] Human lung fibroblasts are obtained from Clonetics (San Diego, Calif.) and maintained in growth media from Clonetics. Dermal microvascular endothelial cells are obtained from Cell Applications (San Diego, Calif.). For proliferation assays, the human lung fibroblasts and dermal microvascular endothelial cells can be cultured at 5,000 cells/well in a 96-well plate for one day in growth medium. The cells are then incubated for one day in 0.1% BSA basal medium. After replacing the medium with fresh 0.1% BSA medium, the cells are incubated with the test proteins for 3 days. Alamar Blue (Alamar Biosciences, Sacramento, Calif.) is added to each well to a final concentration of 10%. The cells are incubated for 4 hr. Cell viability is measured by reading in a CytoFluor fluorescence reader. For the PGE₂ assays, the human lung fibroblasts are cultured at 5,000 cells/well in a 96-well plate for one day. After a medium change to 0.1% BSA basal medium, the cells are incubated with FGF-2 or agonists or antagonists of the invention with or without IL-1α for 24 hours. The supernatants are collected and assayed for PGE₂ by EIA kit (Cayman, Ann Arbor, Mich.). For the IL-6 assays, the human lung fibroblasts are cultured at 5,000 cells/well in a 96-well plate for one day. After a medium change to 0.1% BSA basal medium, the cells are incubated with FGF-2 or with or without agonists or antagonists of the invention IL-1α for 24 hours. The supernatants are collected and assayed for IL-6 by ELISA kit (Endogen, Cambridge, Mass.).

[1150] Human lung fibroblasts are cultured with FGF-2 or agonists or antagonists of the invention for 3 days in basal medium before the addition of Alamar Blue to assess effects on growth of the fibroblasts. FGF-2 should show a stimulation at 10-2500 ng/ml which can be used to compare stimulation with agonists or antagonists of the invention.

[1151] Parkinson Models.

[1152] The loss of motor function in Parkinson's disease is attributed to a deficiency of striatal dopamine resulting from the degeneration of the nigrostriatal dopaminergic projection neurons. An animal model for Parkinson's that has been extensively characterized involves the systemic administration of 1-methyl-4 phenyl 1,2,3,6-tetrahydropyridine (MPTP). In the CNS, MPTP is taken-up by astrocytes and catabolized by monoamine oxidase B to 1-methyl-4-phenyl pyridine (MPP⁺) and released. Subsequently, MPP⁺ is actively accumulated in dopaminergic neurons by the high-affinity reuptake transporter for dopamine. MPP⁺ is then concentrated in mitochondria by the electrochemical gradient and selectively inhibits nicotidamide adenine disphosphate: ubiquinone oxidoreductionase (complex I), thereby interfering with electron transport and eventually generating oxygen radicals.

[1153] It has been demonstrated in tissue culture paradigms that FGF-2 (basic FGF) has trophic activity towards nigral dopaminergic neurons (Ferrari et al., Dev. Biol. 1989). Recently, Dr. Unsicker's group has demonstrated that administering FGF-2 in gel foam implants in the striatum results in the near complete protection of nigral dopaminergic neurons from the toxicity associated with MPTP exposure (Otto and Unsicker, J. Neuroscience, 1990).

[1154] Based on the data with FGF-2, agonists or antagonists of the invention can be evaluated to determine whether it has an action similar to that of FGF-2 in enhancing dopaminergic neuronal survival in vitro and it can also be tested in vivo for protection of dopaminergic neurons in the striatum from the damage associated with MPTP treatment. The potential effect of an agonist or antagonist of the invention is first examined in vitro in a dopaminergic neuronal cell culture paradigm. The cultures are prepared by dissecting the midbrain floor plate from gestation day 14 Wistar rat embryos. The tissue is dissociated with trypsin and seeded at a density of 200,000 cells/cm² on polyorthinine-laminin coated glass coverslips. The cells are maintained in Dulbecco's Modified Eagle's medium and F12 medium containing hormonal supplements (N1). The cultures are fixed with paraformaldehyde after 8 days in vitro and are processed for tyrosine hydroxylase, a specific marker for dopaminergic neurons, immunohistochemical staining. Dissociated cell cultures are prepared from embryonic rats. The culture medium is changed every third day and the factors are also added at that time.

[1155] Since the dopaminergic neurons are isolated from animals at gestation day 14, a developmental time which is past the stage when the dopaminergic precursor cells are proliferating, an increase in the number of tyrosine hydroxylase immunopositive neurons would represent an increase in the number of dopaminergic neurons surviving in vitro. Therefore, if an agonist or antagonist of the invention acts to prolong the survival of dopaminergic neurons, it would suggest that the agonist or antagonist may be involved in Parkinson's Disease.

[1156] The studies described in this example tested activity of agonists or antagonists of the invention. However, one skilled in the art could easily modify the exemplified studies to test the activity of polynucleotides or polypeptides of the invention (e.g., gene therapy).

### Example 25

[1157] The Effect of Agonists or Antagonists of the Invention on the Growth of Vascular Endothelial Cells

[1158] On day 1, human umbilical vein endothelial cells (HUVEC) are seeded at 2-5×10⁴ cells/35 mm dish density in M199 medium containing 4% fetal bovine serum (FBS), 16 units/ml heparin, and 50 units/ml endothelial cell growth supplements (ECGS, Biotechnique, Inc.). On day 2, the medium is replaced with M199 containing 10% FBS, 8 units/ml heparin. An agonist or antagonist of the invention, and positive controls, such as VEGF and basic FGF (bFGF) are added, at varying concentrations. On days 4 and 6, the medium is replaced. On day 8, cell number is determined with a Coulter Counter.

[1159] An increase in the number of HUVEC cells indicates that the compound of the invention may proliferate vascular endothelial cells, while a decrease in the number of HUVEC cells indicates that the compound of the invention inhibits vascular endothelial cells.

[1160] The studies described in this example tested activity of a polypeptide of the invention. However, one skilled in the art could easily modify the exemplified studies to test the activity of polynucleotides (e.g., gene therapy), agonists, and/or antagonists of the invention.

### Example 26

[1161] Rat Corneal Wound Healing Model

[1162] This animal model shows the effect of an agonist or antagonist of the invention on neovascularization. The experimental protocol includes: Making a 1-1.5 mm long incision from the center of cornea into the stromal layer. Inserting a spatula below the lip of the incision facing the outer comer of the eye. Making a pocket (its base is 1-1.5 mm form the edge of the eye). Positioning a pellet, containing 50 ng-5 ug of an agonist or antagonist of the invention, within the pocket. Treatment with an agonist or antagonist of the invention can also be applied topically to the comeal wounds in a dosage range of 20 mg -500 mg (daily treatment for five days).

[1163] The studies described in this example tested activity of agonists or antagonists of the invention. However, one skilled in the art could easily modify the exemplified studies to test the activity of polynucleotides or polypeptides of the invention (e.g., gene therapy).

### Example 27

[1164] Diabetic Mouse and Glucocorticoid-Impaired Wound Healing Models

[1165] Diabetic db+/db+ Mouse Model.

[1166] To demonstrate that an agonist or antagonist of the invention accelerates the healing process, the genetically diabetic mouse model of wound healing is used. The full thickness wound healing model in the db+/db+ mouse is a well characterized, clinically relevant and reproducible model of impaired wound healing. Healing of the diabetic wound is dependent on formation of granulation tissue and re-epithelialization rather than contraction (Gartner, M. H. et al., J. Surg. Res. 52:389 (1992); Greenhalgh, D. G. et al., Am. J. Pathol. 136:1235 (1990)).

[1167] The diabetic animals have many of the characteristic features observed in Type II diabetes mellitus. Homozygous (db+/db+) mice are obese in comparison to their normal heterozygous (db+/+m) littermates. Mutant diabetic (db+/db+) mice have a single autosomal recessive mutation on chromosome 4 (db+) (Coleman et al. Proc. Natl. Acad. Sci. USA 77:283-293 (1982)). Animals show polyphagia, polydipsia and polyuria. Mutant diabetic mice (db+/db+) have elevated blood glucose, increased or normal insulin levels, and suppressed cell-mediated immunity (Mandel et al., J. Immunol. 120:1375 (1978); Debray-Sachs, M. et al., Clin. Exp. Immunol. 51(1):1-7 (1983); Leiter et al., Am. J. of Pathol. 114:46-55 (1985)). Peripheral neuropathy, myocardial complications, and microvascular lesions, basement membrane thickening and glomerular filtration abnormalities have been described in these animals (Norido, F. et al., Exp. Neurol. 83(2):221-232 (1984); Robertson et al., Diabetes 29(1):60-67 (1980); Giacomelli et al., Lab Invest. 40(4):460-473 (1979); Coleman, D. L., Diabetes 31 (Suppl): 1-6 (1982)). These homozygous diabetic mice develop hyperglycemia that is resistant to insulin analogous to human type II diabetes (Mandel et al., J. Immunol. 120:1375-1377 (1978)).

[1168] The characteristics observed in these animals suggests that healing in this model may be similar to the healing observed in human diabetes (Greenhalgh, et al., Am. J. of Pathol. 136:1235-1246 (1990)).

[1169] Genetically diabetic female C57BL/KsJ (db+/db+) mice and their non-diabetic (db+/+m) heterozygous littermates are used in this study (Jackson Laboratories). The animals are purchased at 6 weeks of age and are 8 weeks old at the beginning of the study. Animals are individually housed and received food and water ad libitum. All manipulations are performed using aseptic techniques. The experiments are conducted according to the rules and guidelines of Human Genome Sciences, Inc. Institutional Animal Care and Use Committee and the Guidelines for the Care and Use of Laboratory Animals.

[1170] Wounding protocol is performed according to previously reported methods (Tsuboi, R. and Rifkin, D. B., J. Exp. Med. 172:245-251 (1990)). Briefly, on the day of wounding, animals are anesthetized with an intraperitoneal injection of Avertin (0.01 mg/mL), 2,2,2-tribromoethanol and 2-methyl-2-butanol dissolved in deionized water. The dorsal region of the animal is shaved and the skin washed with 70% ethanol solution and iodine. The surgical area is dried with sterile gauze prior to wounding. An 8 mm full-thickness wound is then created using a Keyes tissue punch. Immediately following wounding, the surrounding skin is gently stretched to eliminate wound expansion. The wounds are left open for the duration of the experiment. Application of the treatment is given topically for 5 consecutive days commencing on the day of wounding. Prior to treatment, wounds are gently cleansed with sterile saline and gauze sponges.

[1171] Wounds are visually examined and photographed at a fixed distance at the day of surgery and at two day intervals thereafter. Wound closure is determined by daily measurement on days 1-5 and on day 8. Wounds are measured horizontally and vertically using a calibrated Jameson caliper. Wounds are considered healed if granulation tissue is no longer visible and the wound is covered by a continuous epithelium.

[1172] An agonist or antagonist of the invention is administered using at a range different doses, from 4 mg to 500 mg per wound per day for 8 days in vehicle. Vehicle control groups received 50 mL of vehicle solution.

[1173] Animals are euthanized on day 8 with an intraperitoneal injection of sodium pentobarbital (300 mg/kg). The wounds and surrounding skin are then harvested for histology and immunohistochemistry. Tissue specimens are placed in 10% neutral buffered fornalin in tissue cassettes between biopsy sponges for further processing.

[1174] Three groups of 10 animals each (5 diabetic and 5 non-diabetic controls) are evaluated: 1) Vehicle placebo control, 2) untreated group, and 3) treated group.

[1175] Wound closure is analyzed by measuring the area in the vertical and horizontal axis and obtaining the total square area of the wound. Contraction is then estimated by establishing the differences between the initial wound area (day 0) and that of post treatment (day 8). The wound area on day 1 is 64 mm², the corresponding size of the dermal punch. Calculations are made using the following formula:

[Open area on day 8]−[Open area on day 1]/[Open area on day 1]

[1176] Specimens are fixed in 10% buffered formalin and paraffin embedded blocks are sectioned perpendicular to the wound surface (5 mm) and cut using a Reichert-Jung microtome. Routine hematoxylin-eosin (H&E) staining is performed on cross-sections of bisected wounds. Histologic examination of the wounds are used to assess whether the healing process and the morphologic appearance of the repaired skin is altered by treatment with an agonist or antagonist of the invention. This assessment included verification of the presence of cell accumulation, inflammatory cells, capillaries, fibroblasts, re-epithelialization and epidermal maturity (Greenhalgh, D. G. et al., Am. J. Pathol. 136:1235 (1990)). A calibrated lens micrometer is used by a blinded observer.

[1177] Tissue sections are also stained immunohistochemically with a polyclonal rabbit anti-human keratin antibody using ABC Elite detection system. Human skin is used as a positive tissue control while non-immune IgG is used as a negative control. Keratinocyte growth is determined by evaluating the extent of reepithelialization of the wound using a calibrated lens micrometer.

[1178] Proliferating cell nuclear antigen/cyclin (PCNA) in skin specimens is demonstrated by using anti-PCNA antibody (1:50) with an ABC Elite detection system. Human colon cancer served as a positive tissue control and human brain tissue is used as a negative tissue control. Each specimen included a section with omission of the primary antibody and substitution with non-immune mouse IgG. Ranking of these sections is based on the extent of proliferation on a scale of 0-8, the lower side of the scale reflecting slight proliferation to the higher side reflecting intense proliferation.

[1179] Experimental data are analyzed using an unpaired t test. A p value of <0.05 is considered significant.

[1180] Steroid Impaired Rat Model

[1181] The inhibition of wound healing by steroids has been well documented in various in vitro and in vivo systems (Wahl, Glucocorticoids and Wound healing. In: Anti-Inflammatory Steroid Action: Basic and Clinical Aspects. 280-302 (1989); Wahlet al., J. Immunol. 115: 476-481 (1975); Werb et al., J. Exp. Med. 147:1684-1694 (1978)). Glucocorticoids retard wound healing by inhibiting angiogenesis, decreasing vascular permeability (Ebert et al., An. Intern. Med. 37:701-705 (1952)), fibroblast proliferation, and collagen synthesis (Beck et al., Growth Factors. 5: 295-304 (1991); Haynes et al., J. Clin. Invest. 61: 703-797 (1978)) and producing a transient reduction of circulating monocytes (Haynes et al., J. Clin. Invest. 61: 703-797 (1978); Wahl, “Glucocorticoids and wound healing”, In: Antiinflammatory Steroid Action: Basic and Clinical Aspects, Academic Press, New York, pp. 280-302 (1989)). The systemic administration of steroids to impaired wound healing is a well establish phenomenon in rats (Beck et al., Growth Factors. 5: 295-304 (1991); Haynes et al., J. Clin. Invest. 61: 703-797 (1978); Wahl, “Glucocorticoids and wound healing”, In: Antiinflammatory Steroid Action: Basic and Clinical Aspects, Academic Press, New York, pp. 280-302 (1989); Pierce et al., Proc. Natl. Acad. Sci. USA 86: 2229-2233 (1989)).

[1182] To demonstrate that an agonist or antagonist of the invention can accelerate the healing process, the effects of multiple topical applications of the agonist or antagonist on full thickness excisional skin wounds in rats in which healing has been impaired by the systemic administration of methylprednisolone is assessed.

[1183] Young adult male Sprague Dawley rats weighing 250-300 g (Charles River Laboratories) are used in this example. The animals are purchased at 8 weeks of age and are 9 weeks old at the beginning of the study. The healing response of rats is impaired by the systemic administration of methylprednisolone (17 mg/kg/rat intramuscularly) at the time of wounding. Animals are individually housed and received food and water ad libitum. All manipulations are performed using aseptic techniques. This study is conducted according to the rules and guidelines of Human Genome Sciences, Inc. Institutional Animal Care and Use Committee and the Guidelines for the Care and Use of Laboratory Animals.

[1184] The wounding protocol is followed according to section A, above. On the day of wounding, animals are anesthetized with an intramuscular injection of ketamine (50 mg/kg) and xylazine (5 mg/kg). The dorsal region of the animal is shaved and the skin washed with 70% ethanol and iodine solutions. The surgical area is dried with sterile gauze prior to wounding. An 8 mm full-thickness wound is created using a Keyes tissue punch. The wounds are left open for the duration of the experiment. Applications of the testing materials are given topically once a day for 7 consecutive days commencing on the day of wounding and subsequent to methylprednisolone administration. Prior to treatment, wounds are gently cleansed with sterile saline and gauze sponges.

[1185] Wounds are visually examined and photographed at a fixed distance at the day of wounding and at the end of treatment. Wound closure is determined by daily measurement on days 1-5 and on day 8. Wounds are measured horizontally and vertically using a calibrated Jameson caliper. Wounds are considered healed if granulation tissue is no longer visible and the wound is covered by a continuous epithelium.

[1186] The agonist or antagonist of the invention is administered using at a range different doses, from 4 mg to 500 mg per wound per day for 8 days in vehicle. Vehicle control groups received 50 mL of vehicle solution.

[1187] Animals are euthanized on day 8 with an intraperitoneal injection of sodium pentobarbital (300 mg/kg). The wounds and surrounding skin are then harvested for histology. Tissue specimens are placed in 10% neutral buffered formalin in tissue cassettes between biopsy sponges for further processing.

[1188] Three groups of 10 animals each (5 with methylprednisolone and 5 without glucocorticoid) are evaluated: 1) Untreated group 2) Vehicle placebo control 3) treated groups.

[1189] Wound closure is analyzed by measuring the area in the vertical and horizontal axis and obtaining the total area of the wound. Closure is then estimated by establishing the differences between the initial wound area (day 0) and that of post treatment (day 8). The wound area on day 1 is 64 mm², the corresponding size of the dermal punch. Calculations are made using the following formula:

[Open area on day 8]−[Open area on day 1]/[Open area on day 1]

[1190] Specimens are fixed in 10% buffered formalin and paraffin embedded blocks are sectioned perpendicular to the wound surface (5 mm) and cut using an Olympus microtome. Routine hematoxylin-eosin (H&E) staining is performed on cross-sections of bisected wounds. Histologic examination of the wounds allows assessment of whether the healing process and the morphologic appearance of the repaired skin is improved by treatment with an agonist or antagonist of the invention. A calibrated lens micrometer is used by a blinded observer to determine the distance of the wound gap.

[1191] Experimental data are analyzed using an unpaired t test. A p value of <0.05 is considered significant.

[1192] The studies described in this example tested activity of agonists or antagonists of the invention. However, one skilled in the art could easily modify the exemplified studies to test the activity of polynucleotides or polypeptides of the invention (e.g., gene therapy).

### Example 28

[1193] Lymphadema Animal Model

[1194] The purpose of this experimental approach is to create an appropriate and consistent lymphedema model for testing the therapeutic effects of an agonist or antagonist of the invention in lymphangiogenesis and re-establishment of the lymphatic circulatory system in the rat hind limb. Effectiveness is measured by swelling volume of the affected limb, quantification of the amount of lymphatic vasculature, total blood plasma protein, and histopathology. Acute lymphedema is observed for 7-10 days. Perhaps more importantly, the chronic progress of the edema is followed for up to 3-4 weeks.

[1195] Prior to beginning surgery, blood sample is drawn for protein concentration analysis. Male rats weighing approximately ˜350 g are dosed with Pentobarbital. Subsequently, the right legs are shaved from knee to hip. The shaved area is swabbed with gauze soaked in 70% EtOH. Blood is drawn for serum total protein testing. Circumference and volumetric measurements are made prior to injecting dye into paws after marking 2 measurement levels (0.5 cm above heel, at mid-pt of dorsal paw). The intradermal dorsum of both right and left paws are injected with 0.05 ml of 1% Evan's Blue. Circumference and volumetric measurements are then made following injection of dye into paws.

[1196] Using the knee joint as a landmark, a mid-leg inguinal incision is made circumferentially allowing the femoral vessels to be located. Forceps and hemostats are used to dissect and separate the skin flaps. After locating the femoral vessels, the lymphatic vessel that runs along side and underneath the vessel(s) is located. The main lymphatic vessels in this area are then electrically coagulated or suture ligated.

[1197] Using a microscope, muscles in back of the leg (near the semitendinosis and adductors) are bluntly dissected. The popliteal lymph node is then located. The 2 proximal and 2 distal lymphatic vessels and distal blood supply of the popliteal node are then ligated by suturing. The popliteal lymph node, and any accompanying adipose tissue, is then removed by cutting connective tissues.

[1198] Care is taken to control any mild bleeding resulting from this procedure. After lymphatics are occluded, the skin flaps are sealed by using liquid skin (Vetbond) (AJ Buck). The separated skin edges are sealed to the underlying muscle tissue while leaving a gap of ˜0.5 cm around the leg. Skin also may be anchored by suturing to underlying muscle when necessary.

[1199] To avoid infection, animals are housed individually with mesh (no bedding). Recovering animals are checked daily through the optimal edematous peak, which typically occurred by day 5-7. The plateau edematous peak are then observed. To evaluate the intensity of the lymphedema, the circumference and volumes of 2 designated places on each paw before operation and daily for 7 days are measured. The effect of plasma proteins on lymphedema is determined and whether protein analysis is a useful testing perimeter is also investigated. The weights of both control and edematous limbs are evaluated at 2 places. Analysis is performed in a blind manner.

[1200] Circumference Measurements: Under brief gas anesthetic to prevent limb movement, a cloth tape is used to measure limb circumference. Measurements are done at the ankle bone and dorsal paw by 2 different people and those 2 readings are averaged. Readings are taken from both control and edematous limbs.

[1201] Volumetric Measurements: On the day of surgery, animals are anesthetized with Pentobarbital and are tested prior to surgery. For daily volumetrics animals are under brief halothane anesthetic (rapid immobilization and quick recovery), and both legs are shaved and equally marked using waterproof marker on legs. Legs are first dipped in water, then dipped into instrument to each marked level, then measured by Buxco edema software(Chen/Victor). Data is recorded by one person, while the other is dipping the limb to marked area.

[1202] Blood-plasma protein measurements: Blood is drawn, spun, and serum separated prior to surgery and then at conclusion for total protein and Ca²⁺ comparison.

[1203] Limb Weight Comparison: After drawing blood, the animal is prepared for tissue collection. The limbs are amputated using a quillitine, then both experimental and control legs are cut at the ligature and weighed. A second weighing is done as the tibio-cacaneal joint is disarticulated and the foot is weighed.

[1204] Histological Preparations: The transverse muscle located behind the knee (popliteal) area is dissected and arranged in a metal mold, filled with freezeGel, dipped into cold methylbutane, placed into labeled sample bags at −80 EC until sectioning. Upon sectioning, the muscle is observed under fluorescent microscopy for lymphatics.

[1205] The studies described in this example tested activity of agonists or antagonists of the invention. However, one skilled in the art could easily modify the exemplified studies to test the activity of polynucleotides or polypeptides of the invention (e.g., gene therapy).

### Example 29

[1206] Suppression of TNF Alpha-induced Adhesion Molecule Expression by a Agonist or Antagonist of the Invention

[1207] The recruitment of lymphocytes to areas of inflammation and angiogenesis involves specific receptor-ligand interactions between cell surface adhesion molecules (CAMs) on lymphocytes and the vascular endothelium. The adhesion process, in both normal and pathological settings, follows a multi-step cascade that involves intercellular adhesion molecule-1 (ICAM-1), vascular cell adhesion molecule-1 (VCAM-1), and endothelial leukocyte adhesion molecule-1 (E-selectin) expression on endothelial cells (EC). The expression of these molecules and others on the vascular endothelium determines the efficiency with which leukocytes may adhere to the local vasculature and extravasate into the local tissue during the development of an inflammatory response. The local concentration of cytokines and growth factor participate in the modulation of the expression of these CAMs.

[1208] Tumor necrosis factor alpha (TNF-a), a potent proinflammatory cytokine, is a stimulator of all three CAMs on endothelial cells and may be involved in a wide variety of inflammatory responses, often resulting in a pathological outcome.

[1209] The potential of an agonist or antagonist of the invention to mediate a suppression of TNF-a induced CAM expression can be examined. A modified ELISA assay which uses ECs as a solid phase absorbent is employed to measure the amount of CAM expression on TNF-a treated ECs when co-stimulated with a member of the FGF family of proteins.

[1210] To perform the experiment, human umbilical vein endothelial cell (HUVEC) cultures are obtained from pooled cord harvests and maintained in growth medium (EGM-2; Clonetics, San Diego, Calif.) supplemented with 10% FCS and 1% penicillin/streptomycin in a 37 degree C. humidified incubator containing 5% CO₂. HUVECs are seeded in 96-well plates at concentrations of 1×10⁴ cells/well in EGM medium at 37 degree C. for 18-24 hrs or until confluent. The monolayers are subsequently washed 3 times with a serum-free solution of RPMI-1640 supplemented with 100 U/ml penicillin and 100 mg/ml streptomycin, and treated with a given cytokine and/or growth factor(s) for 24 h at 37 degree C. Following incubation, the cells are then evaluated for CAM expression.

[1211] Human Umbilical Vein Endothelial cells (HUVECs) are grown in a standard 96 well plate to confluence. Growth medium is removed from the cells and replaced with 90 ul of 199 Medium (10% FBS). Samples for testing and positive or negative controls are added to the plate in triplicate (in 10 ul volumes). Plates are incubated at 37 degree C. for either 5 h (selectin and integrin expression) or 24 h (integrin expression only). Plates are aspirated to remove medium and 100 μl of 0.1% paraformaldehyde-PBS(with Ca++ and Mg++) is added to each well. Plates are held at 4° C. for 30 min.

[1212] Fixative is then removed from the wells and wells are washed 1× with PBS(+Ca,Mg)+0.5% BSA and drained. Do not allow the wells to dry. Add 10 μl of diluted primary antibody to the test and control wells. Anti-ICAM-1-Biotin, Anti-VCAM-1-Biotin and Anti-E-selectin-Biotin are used at a concentration of 10 μg/ml (1:10 dilution of 0.1 mg/ml stock antibody). Cells are incubated at 37° C. for 30 min. in a humidified environment. Wells are washed ×3 with PBS(+Ca,Mg)+0.5% BSA.

[1213] Then add 20 μl of diluted ExtrAvidin-Alkaline Phosphotase (1:5,000 dilution) to each well and incubated at 37° C. for 30 min. Wells are washed ×3 with PBS(+Ca,Mg)+0.5% BSA. 1 tablet of p-Nitrophenol Phosphate pNPP is dissolved in 5 ml of glycine buffer (pH 10.4). 100 μl of pNPP substrate in glycine buffer is added to each test well. Standard wells in triplicate are prepared from the working dilution of the ExtrAvidin-Alkaline Phosphotase in glycine buffer: 1:5,000 (10⁰)>10^{-0.5}>10⁻¹>10^{-1.5}0.5 μl of each dilution is added to triplicate wells and the resulting AP content in each well is 5.50 ng, 1.74 ng, 0.55 ng, 0.18 ng. 100 μl of pNNP reagent must then be added to each of the standard wells. The plate must be incubated at 37° C. for 4 h. A volume of 50 μl of 3M NaOH is added to all wells. The results are quantified on a plate reader at 405 nm. The background subtraction option is used on blank wells filled with glycine buffer only. The template is set up to indicate the concentration of AP-conjugate in each standard well [5.50 ng; 1.74 ng; 0.55 ng; 0.18 ng]. Results are indicated as amount of bound AP-conjugate in each sample.

[1214] The studies described in this example tested activity of agonists or antagonists of the invention. However, one skilled in the art could easily modify the exemplified studies to test the activity of polynucleotides or polypeptides of the invention (e.g., gene therapy).

### Example 30

[1215] Production of Polypeptide of the Invention For High-Throughput Screening Assays

[1216] The following protocol produces a supernatant containing polypeptide of the present invention to be tested. This supernatant can then be used in the Screening Assays described in Examples 32-41.

[1217] First, dilute Poly-D-Lysine (644 587 Boehringer-Mannheim) stock solution (1 mg/ml in PBS) 1:20 in PBS (w/o calcium or magnesium 17-516F Biowhittaker) for a working solution of 50 ug/ml. Add 200 ul of this solution to each well (24 well plates) and incubate at RT for 20 minutes. Be sure to distribute the solution over each well (note: a 12-channel pipetter may be used with tips on every other channel). Aspirate off the Poly-D-Lysine solution and rinse with 1 ml PBS (Phosphate Buffered Saline). The PBS should remain in the well until just prior to plating the cells and plates may be poly-lysine coated in advance for up to two weeks.

[1218] Plate 293T cells (do not carry cells past P+20) at 2×10⁵ cells/well in 0.5 ml DMEM(Dulbecco's Modified Eagle Medium)(with 4.5 G/L glucose and L-glutamine (12-604F Biowhittaker))/10% heat inactivated FBS(14-503F Biowhittaker)/1×Penstrep(17-602E Biowhittaker). Let the cells grow overnight.

[1219] The next day, mix together in a sterile solution basin: 300 ul Lipofectamine (18324-012 Gibco/BRL) and 5 ml Optimem 1 (31985070 Gibco/BRL)/96-well plate. With a small volume multi-channel pipetter, aliquot approximately 2 ug of an expression vector containing a polynucleotide insert, produced by the methods described in Examples 8-10, into an appropriately labeled 96-well round bottom plate. With a multi-channel pipetter, add 50 ul of the Lipofectamine/Optimem I mixture to each well. Pipette up and down gently to mix. Incubate at RT 15-45 minutes. After about 20 minutes, use a multi-channel pipetter to add 150 ul Optimem I to each well. As a control, one plate of vector DNA lacking an insert should be transfected with each set of transfections.

[1220] Preferably, the transfection should be performed by tag-teaming the following tasks. By tag-teaming, hands on time is cut in half, and the cells do not spend too much time on PBS. First, person A aspirates off the media from four 24-well plates of cells, and then person B rinses each well with 0.5-1 ml PBS. Person A then aspirates off PBS rinse, and person B, using a12-channel pipetter with tips on every other channel, adds the 200 ul of DNA/Lipofectamine/Optimem I complex to the odd wells first, then to the even wells, to each row on the 24-well plates. Incubate at 37 degree C. for 6 hours.

[1221] While cells are incubating, prepare appropriate media, either 1% BSA in DMEM with 1× penstrep, or HGS CHO-5 media (116.6 mg/L of CaCl2 (anhyd); 0.00130 mg/L CuSO₄-5H₂O; 0.050 mg/L of Fe(NO₃)₃-9H₂O; 0.417 mg/L of FeSO₄-7H₂O; 311.80 mg/L of Kcl; 28.64 mg/L of MgCl₂; 48.84 mg/L of MgSO₄; 6995.50 mg/L of NaCl; 2400.0 mg/L of NaHCO₃; 62.50 mg/L of NaH₂PO₄-H₂O; 71.02 mg/L of Na₂HPO4; 0.4320 mg/L of ZnSO₄-7H₂O; 0.002 mg/L of Arachidonic Acid; 1.022 mg/L of Cholesterol; 0.070 mg/L of DL-alpha-Tocopherol-Acetate; 0.0520 mg/L of Linoleic Acid; 0.010 mg/L of Linolenic Acid; 0.010 mg/L of Myristic Acid; 0.010 mg/L of Oleic Acid; 0.010 mg/L of Palmitric Acid; 0.010 mg/L of Palmitic Acid; 100 mg/L of Pluronic F-68; 0.010 mg/L of Stearic Acid; 2.20 mg/L of Tween 80; 4551 mg/L of D-Glucose; 130.85 mg/ml of L-Alanine; 147.50 mg/ml of L-Arginine-HCL; 7.50 mg/ml of L-Asparagine-H₂O; 6.65 mg/ml of L-Aspartic Acid; 29.56 mg/ml of L-Cystine-2HCL-H₂O; 31.29 mg/ml of L-Cystine-2HCL; 7.35 mg/ml of L-Glutamic Acid; 365.0 mg/ml of L-Glutamine; 18.75 mg/ml of Glycine; 52.48 mg/ml of L-Histidine-HCL-H₂O; 106.97 mg/ml of L-Isoleucine; 111.45 mg/ml of L-Leucine; 163.75 mg/ml of L-Lysine HCL; 32.34 mg/ml of L-Methionine; 68.48 mg/ml of L-Phenylalainine; 40.0 mg/ml of L-Proline; 26.25 mg/ml of L-Serine; 101.05 mg/ml of L-Threonine; 19.22 mg/ml of L-Tryptophan; 91.79 mg/ml of L-Tryrosine-2Na-2H₂O; and 99.65 mg/ml of L-Valine; 0.0035 mg/L of Biotin; 3.24 mg/L of D-Ca Pantothenate; 11.78 mg/L of Choline Chloride; 4.65 mg/L of Folic Acid; 15.60 mg/L of i-Inositol; 3.02 mg/L of Niacinamide; 3.00 mg/L of Pyridoxal HCL; 0.031 mg/L of Pyridoxine HCL; 0.319 mg/L of Riboflavin; 3.17 mg/L of Thiamine HCL; 0.365 mg/L of Thymidine; 0.680 mg/L of Vitamin B₁₂; 25 mM of HEPES Buffer; 2.39 mg/L of Na Hypoxanthine; 0.105 mg/L of Lipoic Acid; 0.081 mg/L of Sodium Putrescine-2HCL; 55.0 mg/L of Sodium Pyruvate; 0.0067 mg/L of Sodium Selenite; 20 uM of Ethanolamine; 0.122 mg/L of Ferric Citrate; 41.70 mg/L of Methyl-B-Cyclodextrin complexed with Linoleic Acid; 33.33 mg/L of Methyl-B-Cyclodextrin complexed with Oleic Acid; 10 mg/L of Methyl-B-Cyclodextrin complexed with Retinal Acetate. Adjust osmolarity to 327 mOsm) with 2 mm glutamine and 1× penstrep. (BSA (81-068-3 Bayer) 100 gm dissolved in 1 L DMEM for a 10% BSA stock solution). Filter the media and collect 50 ul for endotoxin assay in 15 ml polystyrene conical.

[1222] The transfection reaction is terminated, preferably by tag-teaming, at the end of the incubation period. Person A aspirates off the transfection media, while person B adds 1.5 ml appropriate media to each well. Incubate at 37 degree C. for 45 or 72 hours depending on the media used: 1% BSA for 45 hours or CHO-5 for 72 hours.

[1223] On day four, using a 300 ul multichannel pipetter, aliquot 600 ul in one 1 ml deep well plate and the remaining supernatant into a 2 ml deep well. The supernatants from each well can then be used in the assays described in Examples 32-39.

[1224] It is specifically understood that when activity is obtained in any of the assays described below using a supernatant, the activity originates from either the polypeptide of the present invention directly (e.g., as a secreted protein) or by polypeptide of the present invention inducing expression of other proteins, which are then secreted into the supernatant. Thus, the invention further provides a method of identifying the protein in the supernatant characterized by an activity in a particular assay.

### Example 31

[1225] Construction of GAS Reporter Construct

[1226] One signal transduction pathway involved in the differentiation and proliferation of cells is called the Jaks-STATs pathway. Activated proteins in the Jaks-STATs pathway bind to gamma activation site “GAS” elements or interferon-sensitive responsive element (“ISRE”), located in the promoter of many genes. The binding of a protein to these elements alter the expression of the associated gene.

[1227] GAS and ISRE elements are recognized by a class of transcription factors called Signal Transducers and Activators of Transcription, or “STATs.” There are six members of the STATs family. Stat1 and Stat3 are present in many cell types, as is Stat2 (as response to IFN-alpha is widespread). Stat4 is more restricted and is not in many cell types though it has been found in T helper class I, cells after treatment with IL-12. Stat5 was originally called mammary growth factor, but has been found at higher concentrations in other cells including myeloid cells. It can be activated in tissue culture cells by many cytokines.

[1228] The STATs are activated to translocate from the cytoplasm to the nucleus upon tyrosine phosphorylation by a set of kinases klnown as the Janus Kinase (“Jaks”) family. Jaks represent a distinct family of soluble tyrosine kinases and include Tyk2, Jak1, Jak2, and Jak3. These kinases display significant sequence similarity and are generally catalytically inactive in resting cells.

[1229] The Jaks are activated by a wide range of receptors summarized in the Table below. (Adapted from review by Schidler and Darnell, Ann. Rev. Biochem. 64:621-51 (1995).) A cytokine receptor family, capable of activating Jaks, is divided into two groups: (a) Class 1 includes receptors for IL-2, IL-3, IL-4, IL-6, IL-7, IL-9, IL-11, IL-12, IL-15, Epo, PRL, GH, G-CSF, GM-CSF, LIF, CNTF, and thrombopoietin; and (b) Class 2 includes IFN-a, IFN-g, and IL-10. The Class 1 receptors share a conserved cysteine motif (a set of four conserved cysteines and one tryptophan) and a WSXWS motif (a membrane proximal region encoding Trp-Ser-Xaa-Trp-Ser (SEQ ID NO:2)).

[1230] Thus, on binding of a ligand to a receptor, Jaks are activated, which in turn activate STATs, which then translocate and bind to GAS elements. This entire process is encompassed in the Jaks-STATs signal transduction pathway.

[1231] Therefore, activation of the Jaks-STATs pathway, reflected by the binding of the GAS or the ISRE element, can be used to indicate proteins involved in the proliferation and differentiation of cells. For example, growth factors and cytokines are known to activate the Jaks-STATs pathway. (See Table below.) Thus, by using GAS elements linked to reporter molecules, activators of the Jaks-STATs pathway can be identified.

| JAKs | STATS | GAS(elements) or ISRE | | | | |
|---|---|---|---|---|---|---|
| Ligand | tyk2 | Jak1 | Jak2 | Jak3 | | |
| IFN family | | | | | | |
| IFN-a/B + | + | − | − | 1,2,3 | | ISRE |
| IFN-g | | + | + | − | 1 | GAS (IRF1 > Lys6 > IFP) |
| I1-10 | + | ? | ? | − | 1,3 | |
| gp130 family | | | | | | |
| IL-6 (Pleiotropic) + | + | + | ? | 1,3 | | GAS (IRF1 > Lys6 > IFP) |
| I1-11(Pleiotropic) ? | + | ? | ? | 1,3 | | |
| OnM(Pleiotropic)? | + | + | ? | 1,3 | | |
| LIF(Pleiotropic) ? | + | + | ? | 1,3 | | |
| CNTF(Pleiotropic) | −/+ | + | + | ? | 1,3 | |
| G-CSF(Pleiotropic) | ? | + | ? | ? | 1,3 | |
| IL-12(Pleiotropic) | + | − | + | + | 1,3 | |
| g-C family | | | | | | |
| IL-2 (lymphocytes) | − | + | − | + | 1,3,5 | GAS |
| IL-4 (lymph/myeloid) | − | + | − | + | 6 | GAS (IRF1 = IFP >> Ly6)(IgH) |
| IL-7 (lymphocytes) | − | + | − | + | 5 | GAS |
| IL-9 (lymphocytes) | − | + | − | + | 5 | GAS |
| IL-13 (lymphocyte) | − | + | ? | ? | 6 | GAS |
| IL-15 | ? | + | ? | + | 5 | GAS |
| gp140 family | | | | | | |
| IL-3 (myeloid) | − | − | + | − | 5 | GAS (IRF1 > IFP >> Ly6) |
| IL-5 (myeloid) | − | − | + | − | 5 | GAS |
| GM-CSF (myeloid) | − | − | + | − | 5 | GAS |
| Growth hormone family | | | | | | |
| GH | ? | − | + | − | 5 | |
| PRL | ? | +/− | + | − | 1,3,5 | |
| EPO | ? | − | + | − | 5 | GAS(B − CAS > IRF1 = IFP >> Ly6) |
| Receptor Tyrosine Kinases | | | | | | |
| EGF | ? | + | + | − | 1,3 | GAS (IRF1) |
| PDGF | ? | + | + | − | 1,3 | |
| CSF-1 | ? | + | + | − | 1,3 | GAS (not IRF1) |

[1232] To construct a synthetic GAS containing promoter element, which is used in the Biological Assays described in Examples 32-33, a PCR based strategy is employed to generate a GAS-SV40 promoter sequence. The 5′ primer contains four tandem copies of the GAS binding site found in the IRF1 promoter and previously demonstrated to bind STATs upon induction with a range of cytokines (Rothman et al., Immunity 1:457-468 (1994).), although other GAS or ISRE elements can be used instead. The 5′ primer also contains 18 bp of sequence complementary to the SV40 early promoter sequence and is flanked with an XhoI site. The sequence of the 5′ primer is:

| | |
|---|---|
| 5′:GCGCCTCGAGATTTCCCCGAAATCTAGATTTCC | (SEQ ID NO: 3) |
| CCGAAATGATTTCCCCGAAATGATTTCCCCGAAATA | |
| TCTGCCATCTCAATTAG:3′ | |

[1233] The downstream primer is complementary to the SV40 promoter and is flanked with a Hind III site: 5′:GCGGCAAGCTTTTTGCAAAGCCTAGGC:3′ (SEQ ID NO: 4)

[1234] PCR amplification is performed using the SV40 promoter template present in the B-gal:promoter plasmid obtained from Clontech. The resulting PCR fragment is digested with XhoI/Hind III and subcloned into BLSK2-. (Stratagene.) Sequencing with forward and reverse primers confirms that the insert contains the following sequence:

| | |
|---|---|
| 5′:CTCGAGATTTCCCCGAAATCTAGATTTCCCCGA | (SEQ ID NO: 5) |
| AATGATTTCCCCGAAATGATTTCCCCGAAATATCTG | |
| CCATCTCAATTAGTCAGCAACCATAGTCCCGCCCCT | |
| AACTCCGCCCATCCCGCCCCTAACTCCGCCCAGTTC | |
| CGCCCATTCTCCGCCCCATGGCTGACTAATTTTTTT | |
| TATTTATGCAGAGGCCGAGGCCGCCTCGGCCTCTGA | |
| GCTATTCCAGAAGTAGTGAGGAGGCTTTTTTGGAGG | |
| CCTAGGCTTTTGCAAAAAGCTT:3′ | |

[1235] With this GAS promoter element linked to the SV40 promoter, a GAS:SEAP2 reporter construct is next engineered. Here, the reporter molecule is a secreted alkaline phosphatase, or “SEAP.” Clearly, however, any reporter molecule can be used instead of SEAP, in this or in any of the other Examples. Well known reporter molecules that can be used instead of SEAP include chloramphenicol acetyltransferase (CAT), luciferase, alkaline phosphatase, B-galactosidase, green fluorescent protein (GFP), or any protein detectable by an antibody.

[1236] The above sequence confirmed synthetic GAS-SV40 promoter element is subcloned into the pSEAP-Promoter vector obtained from Clontech using HindIII and XhoI, effectively replacing the SV40 promoter with the amplified GAS:SV40 promoter element, to create the GAS-SEAP vector. However, this vector does not contain a neomycin resistance gene, and therefore, is not preferred for mammalian expression systems.

[1237] Thus, in order to generate mammalian stable cell lines expressing the GAS-SEAP reporter, the GAS-SEAP cassette is removed from the GAS-SEAP vector using SalI and NotI, and inserted into a backbone vector containing the neomycin resistance gene, such as pGFP-1 (Clontech), using these restriction sites in the multiple cloning site, to create the GAS-SEAP/Neo vector. Once this vector is transfected into mammalian cells, this vector can then be used as a reporter molecule for GAS binding as described in Examples 32-33.

[1238] Other constructs can be made using the above description and replacing GAS with a different promoter sequence. For example, construction of reporter molecules containing NFK-B and EGR promoter sequences are described in Examples 34 and 35. However, many other promoters can be substituted using the protocols described in these Examples. For instance, SRE, IL-2, NFAT, or Osteocalcin promoters can be substituted, alone or in combination (e.g., GASINF-KB/EGR, GAS/NF-KB, I1-2/NFAT, or NF-KB/GAS). Similarly, other cell lines can be used to test reporter construct activity, such as HELA (epithelial), HUVEC (endothelial), Reh (B-cell), Saos-2 (osteoblast), HUVAC (aortic), or Cardiomyocyte.

### Example 32

[1239] High-Throughput Screening Assay for T-cell Activity.

[1240] The following protocol is used to assess T-cell activity by identifying factors, and determining whether sup emate containing a polypeptide of the invention proliferates and/or differentiates T-cells. T-cell activity is assessed using the GAS/SEAP/Neo construct produced in Example 31. Thus, factors that increase SEAP activity indicate the ability to activate the Jaks-STATS signal transduction pathway. The T-cell used in this assay is Jurkat T-cells (ATCC Accession No. TIB-152), although Molt-3 cells (ATCC Accession No. CRL-1552) and Molt-4 cells (ATCC Accession No. CRL-1582) cells can also be used.

[1241] Jurkat T-cells are lymphoblastic CD4+ Th1 helper cells. In order to generate stable cell lines, approximately 2 million Jurkat cells are transfected with the GAS-SEAP/neo vector using DMRIE-C (Life Technologies)(transfection procedure described below). The transfected cells are seeded to a density of approximately 20,000 cells per well and transfectants resistant to 1 mg/ml genticin selected. Resistant colonies are expanded and then tested for their response to increasing concentrations of interferon gamma. The dose response of a selected clone is demonstrated.

[1242] Specifically, the following protocol will yield sufficient cells for 75 wells containing 200 ul of cells. Thus, it is either scaled up, or performed in multiple to generate sufficient cells for multiple 96 well plates. Jurkat cells are maintained in RPMI+10% serum with 1% Pen-Strep. Combine 2.5 mls of OPTI-MEM (Life Technologies) with 10 ug of plasmid DNA in a T25 flask. Add 2.5 ml OPTI-MEM containing 50 ul of DMRIE-C and incubate at room temperature for 15-45 mins.

[1243] During the incubation period, count cell concentration, spin down the required number of cells (10⁷ per transfection), and resuspend in OPTI-MEM to a final concentration of 10⁷ cells/ml. Then add 1 ml of 1×10⁷ cells in OPTI-MEM to T25 flask and incubate at 37 degree C. for 6 hrs. After the incubation, add 10 ml of RPMI+15% serum.

[1244] The Jurkat:GAS-SEAP stable reporter lines are maintained in RPMI+10% serum, 1 mg/ml Genticin, and 1% Pen-Strep. These cells are treated with supernatants containing polypeptide of the present invention or polypeptide of the present invention induced polypeptides as produced by the protocol described in Example 30.

[1245] On the day of treatment with the supernatant, the cells should be washed and resuspended in fresh RPMI+10% serum to a density of 500,000 cells per ml. The exact number of cells required will depend on the number of supernatants being screened. For one 96 well plate, approximately 10 million cells (for 10 plates, 100 million cells) are required.

[1246] Transfer the cells to a triangular reservoir boat, in order to dispense the cells into a 96 well dish, using a 12 channel pipette. Using a 12 channel pipette, transfer 200 ul of cells into each well (therefore adding 100, 000 cells per well).

[1247] After all the plates have been seeded, 50 ul of the supernatants are transferred directly from the 96 well plate containing the supernatants into each well using a 12 channel pipette. In addition, a dose of exogenous interferon gamma (0.1, 1.0, 10 ng) is added to wells H9, H10, and H11 to serve as additional positive controls for the assay.

[1248] The 96 well dishes containing Jurkat cells treated with supernatants are placed in an incubator for 48 hrs (note: this time is variable between 48-72 hrs). 35 ul samples from each well are then transferred to an opaque 96 well plate using a 12 channel pipette. The opaque plates should be covered (using sellophene covers) and stored at −20 degree C. until SEAP assays are performed according to Example 36. The plates containing the remaining treated cells are placed at 4 degree C. and serve as a source of material for repeating the assay on a specific well if desired.

[1249] As a positive control, 100 Unit/ml interferon gamma can be used which is known to activate Jurkat T cells. Over 30 fold induction is typically observed in the positive control wells.

[1250] The above protocol may be used in the generation of both transient, as well as stable, transfected cells, which would be apparent to those of skill in the art.

### Example 33

[1251] High-Throughput Screening Assay Identifying Myeloid Activity

[1252] The following protocol is used to assess myeloid activity of polypeptide of the present invention by determining whether polypeptide of the present invention proliferates and/or differentiates myeloid cells. Myeloid cell activity is assessed using the GAS/SEAP/Neo construct produced in Example 31. Thus, factors that increase SEAP activity indicate the ability to activate the Jaks-STATS signal transduction pathway. The myeloid cell used in this assay is U937, a pre-monocyte cell line, although TF-1, HL60, or KG1 can be used.

[1253] To transiently transfect U937 cells with the GAS/SEAP/Neo construct produced in Example 31, a DEAE-Dextran method (Kharbanda et. al., 1994, Cell Growth & Differentiation, 5:259-265) is used. First, harvest 2×10⁷ U937 cells and wash with PBS. The U937 cells are usually grown in RPMI 1640 medium containing 10% heat-inactivated fetal bovine serum (FBS) supplemented with 100 units/ml penicillin and 100 mg/ml streptomycin.

[1254] Next, suspend the cells in 1 ml of 20 mM Tris-HCl (pH 7.4) buffer containing 0.5 mg/ml DEAE-Dextran, 8 ug GAS-SEAP2 plasmid DNA, 140 mM NaCl, 5 mM KCl, 375 uM Na₂HPO₄.7H₂O, 1 mM MgCl₂, and 675 uM CaCl₂. Incubate at 37 degrees C. for 45 min.

[1255] Wash the cells with RPMI 1640 medium containing 10% FBS and then resuspend in 10 ml complete medium and incubate at 37 degree C. for 36 hr.

[1256] The GAS-SEAPIU937 stable cells are obtained by growing the cells in 400 ug/ml G418. The G418-free medium is used for routine growth but every one to two months, the cells should be re-grown in 400 ug/ml G418 for couple of passages.

[1257] These cells are tested by harvesting 1×10⁸ cells (this is enough for ten 96-well plates assay) and wash with PBS. Suspend the cells in 200 ml above described growth medium, with a final density of 5×10⁵ cells/ml. Plate 200 ul cells per well in the 96-well plate (or 1×10⁵ cells/well).

[1258] Add 50 ul of the supernatant prepared by the protocol described in Example 30. Incubate at 37 degee C. for 48 to 72 hr. As a positive control, 100 Unit/ml interferon gamma can be used which is known to activate U937 cells. Over 30 fold induction is typically observed in the positive control wells. SEAP assay the supernatant according to the protocol described in Example 36.

### Example 34

[1259] High-Throughput Screening Assay Identifying Neuronal Activity.

[1260] When cells undergo differentiation and proliferation, a group of genes are activated through many different signal transduction pathways. One of these genes, EGR1 (early growth response gene 1), is induced in various tissues and cell types upon activation. The promoter of EGR1 is responsible for such induction. Using the EGR1 promoter linked to reporter molecules, activation of cells can be assessed by polypeptide of the present invention.

[1261] Particularly, the following protocol is used to assess neuronal activity in PC12 cell lines. PC12 cells (rat phenochromocytoma cells) are known to proliferate and/or differentiate by activation with a number of mitogens, such as TPA (tetradecanoyl phorbol acetate), NGF (nerve growth factor), and EGF (epidermal growth factor). The EGR1 gene expression is activated during this treatment. Thus, by stably transfecting PC12 cells with a construct containing an EGR promoter linked to SEAP reporter, activation of PC12 cells by polypeptide of the present invention can be assessed.

[1262] The EGR/SEAP reporter construct can be assembled by the following protocol. The EGR-1 promoter sequence (−633 to +1)(Sakamoto K et al., Oncogene 6:867-871 (1991)) can be PCR amplified from human genomic DNA using the following primers:

| | |
|---|---|
| 5′ GCGCTCGAGGGATGACAGCGATAGAACCCC | (SEQ ID NO: 6) |
| GG-3′ | |
| 5′ GCGAAGCTTCGCGACTCCCCGGATCCGCCT | (SEQ ID NO: 7) |
| C-3′ | |

[1263] Using the GAS:SEAP/Neo vector produced in Example 31, EGR1 amplified product can then be inserted into this vector. Linearize the GAS:SEAP/Neo vector using restriction enzymes XhoI/HindIII, removing the GAS/SV40 stuffer. Restrict the EGR1 amplified product with these same enzymes. Ligate the vector and the EGR1 promoter.

[1264] To prepare 96 well-plates for cell culture, two mls of a coating solution (1:30 dilution of collagen type I (Upstate Biotech Inc. Cat#08-115) in 30% ethanol (filter sterilized)) is added per one 10 cm plate or 50 ml per well of the 96-well plate, and allowed to air dry for 2 hr.

[1265] PC12 cells are routinely grown in RPMI-1640 medium (Bio Whittaker) containing 10% horse serum (JRH BIOSCIENCES, Cat. # 12449-78P), 5% heat-inactivated fetal bovine serum (FBS) supplemented with 100 units/ml penicillin and 100 ug/ml streptomycin on a precoated 10 cm tissue culture dish. One to four split is done every three to four days. Cells are removed from the plates by scraping and resuspended with pipetting up and down for more than 15 times.

[1266] Transfect the EGR/SEAP/Neo construct into PC12 using the Lipofectamine protocol described in Example 30. EGR-SEAP/PC12 stable cells are obtained by growing the cells in 300 ug/ml G418. The G418-free medium is used for routine growth but every one to two months, the cells should be re-grown in 300 ug/ml G418 for couple of passages.

[1267] To assay for neuronal activity, a 10 cm plate with cells around 70 to 80% confluent is screened by removing the old medium. Wash the cells once with PBS (Phosphate buffered saline). Then starve the cells in low serum medium (RPMI-1640 containing 1% horse serum and 0.5% FBS with antibiotics) overnight.

[1268] The next morning, remove the medium and wash the cells with PBS. Scrape off the cells from the plate, suspend the cells well in 2 ml low serum medium. Count the cell number and add more low serum medium to reach final cell density as 5×10⁵ cells/ml.

[1269] Add 200 ul of the cell suspension to each well of 96-well plate (equivalent to 1×10⁵ cells/well). Add 50 ul supernatant produced by Example 30, 37 degree C. for 48 to 72 hr. As a positive control, a growth factor known to activate PC12 cells through EGR can be used, such as 50 ng/ul of Neuronal Growth Factor (NGF). Over fifty-fold induction of SEAP is typically seen in the positive control wells. SEAP assay the supernatant according to Example 36.

### Example 35

[1270] High-Throughput Screening Assay for T-cell Activity

[1271] NF-KB (Nuclear Factor KB) is a transcription factor activated by a wide variety of agents including the inflammatory cytokines IL-1 and TNF, CD30 and CD40, lymphotoxin-alpha and lymphotoxin-beta, by exposure to LPS or thrombin, and by expression of certain viral gene products. As a transcription factor, NF-KB regulates the expression of genes involved in immune cell activation, control of apoptosis (NF-KB appears to shield cells from apoptosis), B and T-cell development, anti-viral and antimicrobial responses, and multiple stress responses.

[1272] In non-stimulated conditions, NF-KB is retained in the cytoplasm with I-KB (Inhibitor KB). However, upon stimulation, I-KB is phosphorylated and degraded, causing NF-KB to shuttle to the nucleus, thereby activating transcription of target genes. Target genes activated by NF-KB include IL-2, IL-6, GM-CSF, ICAM-1 and class 1 MHC.

[1273] Due to its central role and ability to respond to a range of stimuli, reporter constructs utilizing the NF-KB promoter element are used to screen the supernatants produced in Example 30. Activators or inhibitors of NF-KB would be useful in treating, preventing, and/or diagnosing diseases. For example, inhibitors of NF-KB could be used to treat those diseases related to the acute or chronic activation of NF-KB, such as rheumatoid arthritis.

[1274] To construct a vector containing the NF-KB promoter element, a PCR based strategy is employed. The upstream primer contains four tandem copies of the NF-KB binding site (GGGGACTTTCCC) (SEQ ID NO: 8), 18 bp of sequence complementary to the 5′ end of the SV40 early promoter sequence, and is flanked with an XhoI site:

| | |
|---|---|
| 5′:GCGGCCTCGAGGGGACTTTCCCGGGGACTTTCC | (SEQ ID NO: 9) |
| GGGGACTTTCCGGGACTTTCCATCCTGCCATCTCAA | |
| TTAG:3′ | |

[1275] The downstream primer is complementary to the 3′ end of the SV40 promoter and is flanked with a Hind III site: 5′:GCGGCAAGCTTTTTGCAAAGCCTAGGC:3′ (SEQ ID NO: 4)

[1276] PCR amplification is performed using the SV40 promoter template present in the pB-gal:promoter plasmid obtained from Clontech. The resulting PCR fragment is digested with XhoI and Hind III and subcloned into BLSK2-. (Stratagene) Sequencing with the T7 and T3 primers confirms the insert contains the following sequence:

| | |
|---|---|
| 5′:CTCGAGGGGACTTTCCCGGGGACTTTCCGGG | (SEQ ID NO: 10) |
| GACTTTCCGGGACTTTCCATCTGCCATCTCAATT | |
| AGTCAGCAACCATAGTCCCGCCCCTAACTCCGCC | |
| CATCCCGCCCCTAACTCCGCCCAGTTCCGCCCAT | |
| TCTCCGCCCCATGGCTGACTAATTTTTTTTATTT | |
| ATGCAGAGGCCGAGGCCGCCTCGGCCTCTGAGCT | |
| ATTCCAGAAGTAGTGAGGAGGCTTTTTTGGAGGC | |
| CTAGGCTTTTGCAAAAAGCTT:3′ | |

[1277] Next, replace the SV40 minimal promoter element present in the pSEAP2-promoter plasmid (Clontech) with this NF-KB/SV40 fragment using XhoI and HindIII. However, this vector does not contain a neomycin resistance gene, and therefore, is not preferred for mammalian expression systems.

[1278] In order to generate stable mammalian cell lines, the NF-KB/SV40/SEAP cassette is removed from the above NF-KB/SEAP vector using restriction enzymes SalI and NotI, and inserted into a vector containing neomycin resistance. Particularly, the NF-KB/SV40/SEAP cassette was inserted into pGFP-1 (Clontech), replacing the GFP gene, after restricting pGFP-1 with SalI and NotI.

[1279] Once NF-KB/SV40/SEAP/Neo vector is created, stable Jurkat T-cells are created and maintained according to the protocol described in Example 32. Similarly, the method for assaying supernatants with these stable Jurkat T-cells is also described in Example 32. As a positive control, exogenous TNF alpha (0.1, 1, 10 ng) is added to wells H9, H10, and H11, with a 5-10 fold activation typically observed.

### Example 36

[1280] Assay for SEAP Activity

[1281] As a reporter molecule for the assays described in Examples 32-35, SEAP activity is assayed using the Tropix Phospho-light Kit (Cat. BP-400) according to the following general procedure. The Tropix Phospho-light Kit supplies the Dilution, Assay, and Reaction Buffers used below.

[1282] Prime a dispenser with the 2.5× Dilution Buffer and dispense 15 ul of 2.5× dilution buffer into Optiplates containing 35 ul of a supernatant. Seal the plates with a plastic sealer and incubate at 65 degree C. for 30 min. Separate the Optiplates to avoid uneven heating.

[1283] Cool the samples to room temperature for 15 minutes. Empty the dispenser and prime with the Assay Buffer. Add 50 ml Assay Buffer and incubate at room temperature 5 min. Empty the dispenser and prime with the Reaction Buffer (see the Table below). Add 50 ul Reaction Buffer and incubate at room temperature for 20 minutes. Since the intensity of the chemiluminescent signal is time dependent, and it takes about 10 minutes to read 5 plates on a luminometer, thus one should treat 5 plates at each time and start the second set 10 minutes later.

[1284] Read the relative light unit in the luminometer. Set H12 as blank, and print the results. An increase in chemiluminescence indicates reporter activity.

Reaction Buffer Formulation:

| # of plates | Rxn buffer diluent (ml) | CSPD (ml) |
|---|---|---|
| 10 | 60 | 3 |
| 11 | 65 | 3.25 |
| 12 | 70 | 3.5 |
| 13 | 75 | 3.75 |
| 14 | 80 | 4 |
| 15 | 85 | 4.25 |
| 16 | 90 | 4.5 |
| 17 | 95 | 4.75 |
| 18 | 100 | 5 |
| 19 | 105 | 5.25 |
| 20 | 110 | 5.5 |
| 21 | 115 | 5.75 |
| 22 | 120 | 6 |
| 23 | 125 | 6.25 |
| 24 | 130 | 6.5 |
| 25 | 135 | 6.75 |
| 26 | 140 | 7 |
| 27 | 145 | 7.25 |
| 28 | 150 | 7.5 |
| 29 | 155 | 7.75 |
| 30 | 160 | 8 |
| 31 | 165 | 8.25 |
| 32 | 170 | 8.5 |
| 33 | 175 | 8.75 |
| 34 | 180 | 9 |
| 35 | 185 | 9.25 |
| 36 | 190 | 9.5 |
| 37 | 195 | 9.75 |
| 38 | 200 | 10 |
| 39 | 205 | 10.25 |
| 40 | 210 | 10.5 |
| 41 | 215 | 10.75 |
| 42 | 220 | 11 |
| 43 | 225 | 11.25 |
| 44 | 230 | 11.5 |
| 45 | 235 | 11.75 |
| 46 | 240 | 12 |
| 47 | 245 | 12.25 |
| 48 | 250 | 12.5 |
| 49 | 255 | 12.75 |
| 50 | 260 | 13 |

### Example 37

[1285] High-Throughput Screening Assay Identifying Changes in Small Molecule Concentration and Membrane Permeability

[1286] Binding of a ligand to a receptor is known to alter intracellular levels of small molecules, such as calcium, potassium, sodium, and pH, as well as alter membrane potential. These alterations can be measured in an assay to identify supernatants which bind to receptors of a particular cell. Although the following protocol describes an assay for calcium, this protocol can easily be modified to detect changes in potassium, sodium, pH, membrane potential, or any other small molecule which is detectable by a fluorescent probe.

[1287] The following assay uses Fluorometric Imaging Plate Reader (“FLIPR”) to measure changes in fluorescent molecules (Molecular Probes) that bind small molecules. Clearly, any fluorescent molecule detecting a small molecule can be used instead of the calcium fluorescent molecule, fluo-4 (Molecular Probes, Inc.; catalog no. F-14202), used here.

[1288] For adherent cells, seed the cells at 10,000-20,000 cells/well in a Co-star black 96-well plate with clear bottom. The plate is incubated in a CO₂ incubator for 20 hours. The adherent cells are washed two times in Biotek washer with 200 ul of HBSS (Hank's Balanced Salt Solution) leaving 100 ul of buffer after the final wash.

[1289] A stock solution of 1 mg/ml fluo-4 is made in 10% pluronic acid DMSO. To load the cells with fluo-4 , 50 ul of 12 ug/ml fluo-4 is added to each well. The plate is incubated at 37 degrees C. in a CO₂ incubator for 60 min. The plate is washed four times in the Biotek washer with HBSS leaving 100 ul of buffer.

[1290] For non-adherent cells, the cells are spun down from culture media. Cells are re-suspended to 2-5×10⁶ cells/ml with HBSS in a 50-ml conical tube. 4 ul of 1 mg/ml fluo-4 solution in 10% pluronic acid DMSO is added to each ml of cell suspension. The tube is then placed in a 37 degrees C. water bath for 30-60 min. The cells are washed twice with HBSS, resuspended to 1×10⁶ cells/ml, and dispensed into a microplate, 100 ul/well. The plate is centrifuged at 1000 rpm for 5 min. The plate is then washed once in Denley Cell Wash with 200 ul, followed by an aspiration step to 100 ul final volume.

[1291] For a non-cell based assay, each well contains a fluorescent molecule, such as fluo-4. The supernatant is added to the well, and a change in fluorescence is detected.

[1292] To measure the fluorescence of intracellular calcium, the FLIPR is set for the following parameters: (1) System gain is 300-800 mW; (2) Exposure time is 0.4 second; (3) Camera F/stop is F/2; (4) Excitation is 488 nm; (5) Emission is 530 nm; and (6) Sample addition is 50 ul. Increased emission at 530 nm indicates an extracellular signaling event caused by the a molecule, either polypeptide of the present invention or a molecule induced by polypeptide of the present invention, which has resulted in an increase in the intracellular Ca⁺⁺ concentration.

### Example 38

[1293] High-Throughput Screening Assay Identifying Tyrosine Kinase Activity

[1294] The Protein Tyrosine Kinases (PTK) represent a diverse group of transmembrane and cytoplasmic kinases. Within the Receptor Protein Tyrosine Kinase RPTK) group are receptors for a range of mitogenic and metabolic growth factors including the PDGF, FGF, EGF, NGF, HGF and Insulin receptor subfamilies. In addition there are a large family of RPTKs for which the corresponding ligand is unknown. Ligands for RPTKs include mainly secreted small proteins, but also membrane-bound and extracellular matrix proteins.

[1295] Activation of RPTK by ligands involves ligand-mediated receptor dimerization, resulting in transphosphorylation of the receptor subunits and activation of the cytoplasmic tyrosine kinases. The cytoplasmic tyrosine kinases include receptor associated tyrosine kinases of the src-family (e.g., src, yes, lck, lyn, fyn) and non-receptor linked and cytosolic protein tyrosine kinases, such as the Jak family, members of which mediate signal transduction triggered by the cytokine superfamily of receptors (e.g., the Interleukins, Interferons, GM-CSF, and Leptin).

[1296] Because of the wide range of known factors capable of stimulating tyrosine kinase activity, identifying whether polypeptide of the present invention or a molecule induced by polypeptide of the present invention is capable of activating tyrosine kinase signal transduction pathways is of interest. Therefore, the following protocol is designed to identify such molecules capable of activating the tyrosine kinase signal transduction pathways.

[1297] Seed target cells (e.g., primary keratinocytes) at a density of approximately 25,000 cells per well in a 96 well Loprodyne Silent Screen Plates purchased from Nalge Nunc (Naperville, Ill.). The plates are sterilized with two 30 minute rinses with 100% ethanol, rinsed with water and dried overnight. Some plates are coated for 2 hr with 100 ml of cell culture grade type I collagen (50 mg/ml), gelatin (2%) or polylysine (50 mg/ml), all of which can be purchased from Sigma Chemicals (St. Louis, Mo.) or 10% Matrigel purchased from Becton Dickinson (Bedford, Mass.), or calf serum, rinsed with PBS and stored at 4 degree C. Cell growth on these plates is assayed by seeding 5,000 cells/well in growth medium and indirect quantitation of cell number through use of alamarBlue as described by the manufacturer Alamar Biosciences, Inc. (Sacramento, Calif.) after 48 hr. Falcon plate covers #3071 from Becton Dickinson (Bedford, Mass.) are used to cover the Loprodyne Silent Screen Plates. Falcon Microtest III cell culture plates can also be used in some proliferation experiments.

[1298] To prepare extracts, A431 cells are seeded onto the nylon membranes of Loprodyne plates (20,000/200 ml/well) and cultured overnight in complete medium. Cells are quiesced by incubation in serum-free basal medium for 24 hr. After 5-20 minutes treatment with EGF (60 ng/ml) or 50 ul of the supernatant produced in Example 30, the medium was removed and 100 ml of extraction buffer ((20 mM HEPES pH 7.5, 0.15 M NaCl, 1% Triton X-100, 0.1% SDS, 2 mM Na3VO4, 2 mM Na4P207 and a cocktail of protease inhibitors (# 1836170) obtained from Boeheringer Mannheim (Indianapolis, Ind.)) is added to each well and the plate is shaken on a rotating shaker for 5 minutes at 4° C. The plate is then placed in a vacuum transfer manifold and the extract filtered through the 0.45 mm membrane bottoms of each well using house vacuum. Extracts are collected in a 96-well catch/assay plate in the bottom of the vacuum manifold and immediately placed on ice. To obtain extracts clarified by centrifugation, the content of each well, after detergent solubilization for 5 minutes, is removed and centrifuged for 15 minutes at 4 degree C. at 16,000×g.

[1299] Test the filtered extracts for levels of tyrosine kinase activity. Although many methods of detecting tyrosine kinase activity are known, one method is described here.

[1300] Generally, the tyrosine kinase activity of a supernatant is evaluated by determining its ability to phosphorylate a tyrosine residue on a specific substrate (a biotinylated peptide). Biotinylated peptides that can be used for this purpose include PSK1 (corresponding to amino acids 6-20 of the cell division kinase cdc2-p34) and PSK2 (corresponding to amino acids 1-17 of gastrin). Both peptides are substrates for a range of tyrosine kinases and are available from Boehringer Mannheim.

[1301] The tyrosine kinase reaction is set up by adding the following components in order. First, add 10 ul of 5 uM Biotinylated Peptide, then 10 ul ATP/Mg₂₊ (5 mM ATP/50 mM MgCl₂), then 10 ul of 5× Assay Buffer (40 mM imidazole hydrochloride, pH7.3, 40 mM beta-glycerophosphate, 1 mM EGTA, 100 mM MgCl₂, 5 mM MnCl₂, 0.5 mg/ml BSA), then 5 ul of Sodium Vanadate (1 mM), and then 5 ul of water. Mix the components gently and preincubate the reaction mix at 30 degree C. for 2 min. Initial the reaction by adding 10 ul of the control enzyme or the filtered supernatant.

[1302] The tyrosine kinase assay reaction is then terminated by adding 10 ul of 120 mm EDTA and place the reactions on ice.

[1303] Tyrosine kinase activity is determined by transferring 50 ul aliquot of reaction mixture to a microtiter plate (MTP) module and incubating at 37 degree C. for 20 min. This allows the streptavidin coated 96 well plate to associate with the biotinylated peptide. Wash the MTP module with 300 ul/well of PBS four times. Next add 75 ul of anti-phospotyrosine antibody conjugated to horse radish peroxidase (anti-P-Tyr-POD(0.5 u/ml)) to each well and incubate at 37 degree C. for one hour. Wash the well as above.

[1304] Next add 100 ul of peroxidase substrate solution (Boehringer Mannheim) and incubate at room temperature for at least 5 mins (up to 30 min). Measure the absorbance of the sample at 405 nm by using ELISA reader. The level of bound peroxidase activity is quantitated using an ELISA reader and reflects the level of tyrosine kinase activity.

### Example 39

[1305] High-Throughput Screening Assay Identifying Phosphorylation Activity

[1306] As a potential alternative and/or complement to the assay of protein tyrosine kinase activity described in Example 38, an assay which detects activation (phosphorylation) of major intracellular signal transduction intermediates can also be used. For example, as described below one particular assay can detect tyrosine phosphorylation of the Erk-1 and Erk-2 kinases. However, phosphorylation of other molecules, such as Raf, JNK, p38 MAP, Map kinase kinase (MEK), MEK kinase, Src, Muscle specific kinase (MuSK), IRAK, Tec, and Janus, as well as any other phosphoserine, phosphotyrosine, or phosphothreonine molecule, can be detected by substituting these molecules for Erk-1 or Erk-2 in the following assay.

[1307] Specifically, assay plates are made by coating the wells of a 96-well ELISA plate with 0.1 ml of protein G (1 ug/ml) for 2 hr at room temp, (RT). The plates are then rinsed with PBS and blocked with 3% BSA/PBS for 1 hr at RT. The protein G plates are then treated with 2 commercial monoclonal antibodies (100 ng/well) against Erk-1 and Erk-2 (1 hr at RT) (Santa Cruz Biotechnology). (To detect other molecules, this step can easily be modified by substituting a monoclonal antibody detecting any of the above described molecules.) After 3-5 rinses with PBS, the plates are stored at 4 degree C. until use.

[1308] A431 cells are seeded at 20,000/well in a 96-well Loprodyne filterplate and cultured overnight in growth medium. The cells are then starved for 48 hr in basal medium (DMEM) and then treated with EGF (6 ng/well) or 50 ul of the supernatants obtained in Example 30 for 5-20 minutes. The cells are then solubilized and extracts filtered directly into the assay plate.

[1309] After incubation with the extract for 1 hr at RT, the wells are again rinsed. As a positive control, a commercial preparation of MAP kinase (10 ng/well) is used in place of A431 extract. Plates are then treated with a commercial polyclonal (rabbit) antibody (1 ug/ml) which specifically recognizes the phosphorylated epitope of the Erk-1 and Erk-2 kinases (1 hr at RT). This antibody is biotinylated by standard procedures. The bound polyclonal antibody is then quantitated by successive incubations with Europium-streptavidin and Europium fluorescence enhancing reagent in the Wallac DELFIA instrument (time-resolved fluorescence). An increased fluorescent signal over background indicates a phosphorylation by polypeptide of the present invention or a molecule induced by polypeptide of the present invention.

### Example 40

[1310] Assay for the Stimulation of Bone Marrow CD34+ Cell Proliferation

[1311] This assay is based on the ability of human CD34+ to proliferate in the presence of hematopoietic growth factors and evaluates the ability of isolated polypeptides expressed in mammalian cells to stimulate proliferation of CD34+ cells.

[1312] It has been previously shown that most mature precursors will respond to only a single signal. More immature precursors require at least two signals to respond. Therefore, to test the effect of polypeptides on hematopoietic activity of a wide range of progenitor cells, the assay contains a given polypeptide in the presence or absence of other hematopoietic growth factors. Isolated cells are cultured for 5 days in the presence of Stem Cell Factor (SCF) in combination with tested sample. SCF alone has a very limited effect on the proliferation of bone marrow (BM) cells, acting in such conditions only as a “survival” factor. However, combined with any factor exhibiting stimulatory effect on these cells (e.g., IL-3), SCF will cause a synergistic effect. Therefore, if the tested polypeptide has a stimulatory effect on hematopoietic progenitors, such activity can be easily detected. Since normal BM cells have a low level of cycling cells, it is likely that any inhibitory effect of a given polypeptide, or agonists or antagonists thereof, might not be detected. Accordingly, assays for an inhibitory effect on progenitors is preferably tested in cells that are first subjected to in vitro stimulation with SCF+IL+3, and then contacted with the compound that is being evaluated for inhibition of such induced proliferation.

[1313] Briefly, CD34+ cells are isolated using methods known in the art. The cells are thawed and resuspended in medium (QBSF 60 serum-free medium with 1% L-glutamine (500 ml) Quality Biological, Inc., Gaithersburg, Md. Cat# 160-204-101). After several gentle centrifugation steps at 200×g, cells are allowed to rest for one hour. The cell count is adjusted to 2.5×10⁵ cells/ml. During this time, 100 μl of sterile water is added to the peripheral wells of a 96-well plate. The cytokines that can be tested with a given polypeptide in this assay is rhSCF (R&D Systems, Minneapolis, Minn., Cat# 255-SC) at 50 ng/ml alone and in combination with rhSCF and rhIL-3 (R&D Systems, Minneapolis, Minn., Cat# 203-ML) at 30 ng/ml. After one hour, 10 μl of prepared cytokines, 50 μl of the supernatants prepared in Example 30 (supernatants at 1:2 dilution=50 μl) and 20 μl of diluted cells are added to the media which is already present in the wells to allow for a final total volume of 100 μl. The plates are then placed in a 37° C./5% CO₂ incubator for five days.

[1314] Eighteen hours before the assay is harvested, 0.5 μCi/well of [3H] Thymidine is added in a 10 μl volume to each well to determine the proliferation rate. The experiment is terminated by harvesting the cells from each 96-well plate to a filtermat using the Tomtec Harvester 96. After harvesting, the filtermats are dried, trimmed and placed into OmniFilter assemblies consisting of one OmniFilter plate and one OmniFilter Tray. 60 μl Microscint is added to each well and the plate sealed with TopSeal-A press-on sealing film A bar code 15 sticker is affixed to the first plate for counting. The sealed plates are then loaded and the level of radioactivity determined via the Packard Top Count and the printed data collected for analysis. The level of radioactivity reflects the amount of cell proliferation.

[1315] The studies described in this example test the activity of a given polypeptide to stimulate bone marrow CD34+ cell proliferation. One skilled in the art could easily modify the exemplified studies to test the activity of polynucleotides (e.g., gene therapy), antibodies, agonists, and/or antagonists and fragments and variants thereof. As a nonlimiting example, potential antagonists tested in this assay would be expected to inhibit cell proliferation in the presence of cytokines and/or to increase the inhibition of cell proliferation in the presence of cytokines and a given polypeptide. In contrast, potential agonists tested in this assay would be expected to enhance cell proliferation and/or to decrease the inhibition of cell proliferation in the presence of cytokines and a given polypeptide.

[1316] The ability of a gene to stimulate the proliferation of bone marrow CD34+ cells indicates that polynucleotides and polypeptides corresponding to the gene are useful for the diagnosis and treatment of disorders affecting the immune system and hematopoiesis. Representative uses are described in the “Immune Activity” and “Infectious Disease” sections above, and elsewhere herein.

### Example 41

[1317] Assay for Extracellular Matrix Enhanced Cell Response (EMECR)

[1318] The objective of the Extracellular Matrix Enhanced Cell Response (EMECR) assay is to identify gene products (e.g., isolated polypeptides) that act on the hematopoietic stem cells in the context of the extracellular matrix (ECM) induced signal.

[1319] Cells respond to the regulatory factors in the context of signal(s) received from the surrounding microenvironment. For example, fibroblasts, and endothelial and epithelial stem cells fail to replicate in the absence of signals from the ECM. Hematopoietic stem cells can undergo self-renewal in the bone marrow, but not in in vitro suspension culture. The ability of stem cells to undergo self-renewal in vitro is dependent upon their interaction with the stromal cells and the ECM protein fibronectin (fn). Adhesion of cells to fn is mediated by the α_{5.}β₁ and α_{4.}β₁ integrin receptors, which are expressed by human and mouse hematopoietic stem cells. The factor(s) which integrate with the ECM environment and are responsible for stimulating stem cell self-renewal have not yet been identified. Discovery of such factors should be of great interest in gene therapy and bone marrow transplant applications

[1320] Briefly, polystyrene, non tissue culture treated, 96-well plates are coated with fn fragment at a coating concentration of 0.2 μg/cm². Mouse bone marrow cells are plated (1,000 cells/well ) in 0.2 ml of serum-free medium. Cells cultured in the presence of IL-3 (5 ng/ml )+SCF (50 ng/ml ) would serve as the positive control, conditions under which little self-renewal but pronounced differentiation of the stem cells is to be expected. Gene products of the invention (e.g., including, but not limited to, polynucleotides and polypeptides of the present invention, and supernatants produced in Example 30), are tested with appropriate negative controls in the presence and absence of SCF(5.0 ng/ml), where test factor supernatants represent 10% of the total assay volume. The plated cells are then allowed to grow by incubating in a low oxygen environment (5% CO₂, 7% O₂, and 88% N₂) tissue culture incubator for 7 days. The number of proliferating cells within the wells is then quantitated by measuring thymidine incorporation into cellular DNA. Verification of the positive hits in the assay will require phenotypic characterization of the cells, which can be accomplished by scaling up of the culture system and using appropriate antibody reagents against cell surface antigens and FACScan.

[1321] One skilled in the art could easily modify the exemplified studies to test the activity of polynucleotides (e.g., gene therapy), antibodies, agonists, and/or antagonists and fragments and variants thereof.

[1322] If a particular polypeptide of the present invention is found to be a stimulator of hematopoietic progenitors, polynucleotides and polypeptides corresponding to the gene encoding said polypeptide may be useful for the diagnosis and treatment of disorders affecting the immune system and hematopoiesis. Representative uses are described in the “Immune Activity” and “Infectious Disease” sections above, and elsewhere herein. The gene product may also be useful in the expansion of stem cells and committed progenitors of various blood lineages, and in the differentiation and/or proliferation of various cell types.

[1323] Additionally, the polynucleotides and/or polypeptides of the gene of interest and/or agonists and/or antagonists thereof, may also be employed to inhibit the proliferation and differentiation of hematopoietic cells and therefore may be employed to protect bone marrow stem cells from chemotherapeutic agents during chemotherapy. This antiproliferative effect may allow administration of higher doses of chemotherapeutic agents and, therefore, more effective chemotherapeutic treatment.

[1324] Moreover, polynucleotides and polypeptides corresponding to the gene of interest may also be useful for the treatment and diagnosis of hematopoietic related disorders such as, for example, anemia, pancytopenia, leukopenia, thrombocytopenia or leukemia since stromal cells are important in the production of cells of hematopoietic lineages. The uses include bone marrow cell ex-vivo culture, bone marrow transplantation, bone marrow reconstitution, radiotherapy or chemotherapy of neoplasia.

### Example 42

[1325] Human Dermal Fibroblast and Aortic Smooth Muscle Cell Proliferation

[1326] The polypeptide of interest is added to cultures of normal human dermal fibroblasts (NHDF) and human aortic smooth muscle cells (AOSMC) and two co-assays are performed with each sample. The first assay examines the effect of the polypeptide of interest on the proliferation of normal human dermal fibroblasts (NHDF) or aortic smooth muscle cells (AoSMC). Aberrant growth of fibroblasts or smooth muscle cells is a part of several pathological processes, including fibrosis, and restenosis. The second assay examines IL6 production by both NHDF and SMC. IL6 production is an indication of functional activation. Activated cells will have increased production of a number of cytokines and other factors, which can result in a proinflammatory or immunomodulatory outcome. Assays are run with and without co-TNFa stimulation, in order to check for costimulatory or inhibitory activity.

[1327] Briefly, on day 1, 96-well black plates are set up with 1000 cells/well (NHDF) or 2000 cells/well (AoSMC) in 100 μl culture media. NHDF culture media contains: Clonetics FB basal media, 1 mg/ml hFGF, 5 mg/ml insulin, 50 mg/ml gentamycin, 2% FBS, while AoSMC culture media contains Clonetics SM basal media, 0.5 μg/ml hEGF, 5 mg/ml insulin, 1 μg/ml hFGF, 50 mg/ml gentamycin, 50 μg/ml Amphotericin B, 5% FBS. After incubation at 37° C. for at least 4-5 hours culture media is aspirated and replaced with growth arrest media. Growth arrest media for NHDF contains fibroblast basal media, 50 mg/ml gentamycin, 2% FBS, while growth arrest media for AoSMC contains SM basal media, 50 mg/ml gentamycin, 50 μg/ml Amphotericin B, 0.4% FBS. Incubate at 37° C. until day 2.

[1328] On day 2, serial dilutions and templates of the polypeptide of interest are designed such that they always include media controls and known-protein controls. For both stimulation and inhibition experiments, proteins are diluted in growth arrest media. For inhibition experiments, TNFa is added to a final concentration of 2 ng/ml (NHDF) or 5 ng/ml (AoSMC). Add 1/3 vol media containing controls or polypeptides of the present invention and incubate at 37 degrees C./5% CO₂ until day 5.

[1329] Transfer 60 μl from each well to another labeled 96-well plate, cover with a plate-sealer, and store at 4 degrees C. until Day 6 (for IL6 ELISA). To the remaining 100 μl in the cell culture plate, aseptically add Alamar Blue in an amount equal to 10% of the culture volume (10 μl). Return plates to incubator for 3 to 4 hours. Then measure fluorescence with excitation at 530 nm and emission at 590 nm using the CytoFluor. This yields the growth stimulation/inhibition data.

[1330] On day 5, the IL6 ELISA is performed by coating a 96 well plate with 50-100 ul/well of Anti-Human IL6 Monoclonal antibody diluted in PBS, pH 7.4, incubate ON at room temperature.

[1331] On day 6, empty the plates into the sink and blot on paper towels. Prepare Assay Buffer containing PBS with 4% BSA. Block the plates with 200 μl/well of Pierce Super Block blocking buffer in PBS for 1-2 hr and then wash plates with wash buffer (PBS, 0.05% Tween-20). Blot plates on paper towels. Then add 50 μl/well of diluted Anti-Human IL-6 Monoclonal, Biotin-labeled antibody at 0.50 mg/ml. Make dilutions of IL-6 stock in media (30, 10, 3, 1, 0.3, 0 ng/ml). Add duplicate samples to top row of plate. Cover the plates and incubate for 2 hours at RT on shaker.

[1332] Plates are washed with wash buffer and blotted on paper towels. Dilute EU-labeled Streptavidin 1:1000 in Assay buffer, and add 100 μl/well. Cover the plate and incubate 1 h at RT. Plates are again washed with wash buffer and blotted on paper towels.

[1333] Add 100 μl/well of Enhancement Solution. Shake for 5 minutes. Read the plate on the Wallac DELFIA Fluorometer. Readings from triplicate samples in each assay were tabulated and averaged.

[1334] A positive result in this assay suggests AoSMC cell proliferation and that the polypeptide of the present invention may be involved in dermal fibroblast proliferation and/or smooth muscle cell proliferation. A positive result also suggests many potential uses of polypeptides, polynucleotides, agonists and/or antagonists of the polynucleotide/polypeptide of the present invention which gives a positive result. For example, inflammation and immune responses, wound healing, and angiogenesis, as detailed throughout this specification. Particularly, polypeptides of the present invention and polynucleotides of the present invention may be used in wound healing and dermal regeneration, as well as the promotion of vasculogenesis, both of the blood vessels and lymphatics. The growth of vessels can be used in the treatment of, for example, cardiovascular diseases. Additionally, antagonists of polypeptides and polynucleotides of the invention may be useful in treating diseases, disorders, and/or conditions which involve angiogenesis by acting as an anti-vascular agent (e.g., anti-angiogenesis). These diseases, disorders, and/or conditions are known in the art and/or are described herein, such as, for example, malignancies, solid tumors, benign tumors, for example hemangiomas, acoustic neuromas, neurofibromas, trachomas, and pyogenic granulomas; artheroscleric plaques; ocular angiogenic diseases, for example, diabetic retinopathy, retinopathy of prematurity, macular degeneration, corneal graft rejection, neovascular glaucoma, retrolental fibroplasia, rubeosis, retinoblastoma, uvietis and Pterygia (abnormal blood vessel growth) of the eye; rheumatoid arthritis; psoriasis; delayed wound healing; endometriosis; vasculogenesis; granulations; hypertrophic scars (keloids); nonunion fractures; scleroderma; trachoma; vascular adhesions; myocardial angiogenesis; coronary collaterals; cerebral collaterals; arteriovenous malformations; ischemic limb angiogenesis; Osler-Webber Syndrome; plaque neovascularization; telangiectasia; hemophiliac joints; angiofibroma; fibromuscular dysplasia; wound granulation; Crohn's disease; and atherosclerosis. Moreover, antagonists of polypeptides and polynucleotides of the invention may be useful in treating anti-hyperproliferative diseases and/or anti-inflammatory known in the art and/or described herein.

[1335] One skilled in the art could easily modify the exemplified studies to test the activity of polynucleotides (e.g., gene therapy), antibodies, agonists, and/or antagonists and fragments and variants thereof.

### Example 43

[1336] Cellular Adhesion Molecule (CAM) Expression on Endothelial Cells

[1337] The recruitment of lymphocytes to areas of inflammation and angiogenesis involves specific receptor-ligand interactions between cell surface adhesion molecules (CAMs) on lymphocytes and the vascular endothelium. The adhesion process, in both normal and pathological settings, follows a multi-step cascade that involves intercellular adhesion molecule-1 (ICAM-1), vascular cell adhesion molecule-1 (VCAM-1), and endothelial leukocyte adhesion molecule-1 (E-selectin) expression on endothelial cells (EC). The expression of these molecules and others on the vascular endothelium determines the efficiency with which leukocytes may adhere to the local vasculature and extravasate into the local tissue during the development of an inflammatory response. The local concentration of cytokines and growth factor participate in the modulation of the expression of these CAMs.

[1338] Briefly, endothelial cells (e.g., Human Umbilical Vein Endothelial cells (HUVECs)) are grown in a standard 96 well plate to confluence, growth medium is removed from the cells and replaced with 100 μl of 199 Medium (10% fetal bovine serum (FBS)). Samples for testing and positive or negative controls are added to the plate in triplicate (in 10 μl volumes). Plates are then incubated at 37° C. for either 5 h (selectin and integrin expression) or 24 h (integrin expression only). Plates are aspirated to remove medium and 100 μl of 0.1% paraformaldehyde-PBS(with Ca++ and Mg++) is added to each well. Plates are held at 4° C. for 30 min. Fixative is removed from the wells and wells are washed 1× with PBS(+Ca, Mg)+0.5% BSA and drained. 10 μl of diluted primary antibody is added to the test and control wells. Anti-ICAM-1-Biotin, Anti-VCAM-1-Biotin and Anti-E-selectin-Biotin are used at a concentration of 10 μg/ml (1:10 dilution of 0.1 mg/ml stock antibody). Cells are incubated at 37° C. for 30 min. in a humidified environment. Wells are washed three times with PBS(+Ca, Mg)+0.5% BSA. 20 μl of diluted ExtrAvidin-Alkaline Phosphatase (1:5,000 dilution, referred to herein as the working dilution) are added to each well and incubated at 37° C. for 30 min. Wells are washed three times with PBS(+Ca, Mg)+0.5% BSA. Dissolve 1 tablet of p-Nitrophenol Phosphate pNPP per 5 ml of glycine buffer (pH 10.4). 100 μl of pNPP substrate in glycine buffer is added to each test well. Standard wells in triplicate are prepared from the working dilution of the ExtrAvidin-Alkaline Phosphotase in glycine buffer: 1:5,000 (10⁰)>10^{-0.5}>10⁻¹>10^{-1.5}0.5 μl of each dilution is added to triplicate wells and the resulting AP content in each well is 5.50 ng, 1.74 ng, 0.55 ng, 0.18 ng. 100 μl of pNNP reagent is then added to each of the standard wells. The plate is incubated at 37° C. for 4 h. A volume of 50 μl of 3M NaOH is added to all wells. The plate is read on a plate reader at 405 nm using the background subtraction option on blank wells filled with glycine buffer only. Additionally, the template is set up to indicate the concentration of AP-conjugate in each standard well [5.50 ng; 1.74 ng; 0.55 ng; 0.18 ng]. Results are indicated as amount of bound AP-conjugate in each sample.

### Example 44

[1339] Alamar Blue Endothelial Cells Proliferation Assay

[1340] This assay may be used to quantitatively determine protein mediated inhibition of bFGF-induced proliferation of Bovine Lymphatic Endothelial Cells (LECs), Bovine Aortic Endothelial Cells (BAECs) or Human Microvascular Uterine Myometrial Cells (UTMECs). This assay incorporates a fluorometric growth indicator based on detection of metabolic activity. A standard Alamar Blue Proliferation Assay is prepared in EGM-2MV with 10 ng/ml of bFGF added as a source of endothelial cell stimulation. This assay may be used with a variety of endothelial cells with slight changes in growth medium and cell concentration. Dilutions of the protein batches to be tested are diluted as appropriate. Serum-free medium (GIBCO SFM) without bFGF is used as a non-stimulated control and Angiostatin or TSP-1 are included as a known inhibitory controls.

[1341] Briefly, LEC, BAECs or UTMECs are seeded in growth media at a density of 5000 to 2000 cells/well in a 96 well plate and placed at 37degrees C. overnight. After the overnight incubation of the cells, the growth media is removed and replaced with GIBCO EC-SFM. The cells are treated with the appropriate dilutions of the protein of interest or control protein sample(s) (prepared in SFM) in triplicate wells with additional bFGF to a concentration of 10 ng/ ml. Once the cells have been treated with the samples, the plate(s) is/are placed back in the 37° C. incubator for three days. After three days 10 ml of stock alamar blue (Biosource Cat# DAL1100) is added to each well and the plate(s) is/are placed back in the 37° C. incubator for four hours. The plate(s) are then read at 530 nm excitation and 590 nm emission using the CytoFluor fluorescence reader. Direct output is recorded in relative fluorescence units.

[1342] Alamar blue is an oxidation-reduction indicator that both fluoresces and changes color in response to chemical reduction of growth medium resulting from cell growth. As cells grow in culture, innate metabolic activity results in a chemical reduction of the immediate surrounding environment. Reduction related to growth causes the indicator to change from oxidized (non-fluorescent blue) form to reduced (fluorescent red) form (i.e., stimulated proliferation will produce a stronger signal and inhibited proliferation will produce a weaker signal and the total signal is proportional to the total number of cells as well as their metabolic activity). The background level of activity is observed with the starvation medium alone. This is compared to the output observed from the positive control samples (bFGF in growth medium) and protein dilutions.

### Example 45

[1343] Detection of Inhibition of a Mixed Lymphocyte Reaction

[1344] This assay can be used to detect and evaluate inhibition of a Mixed Lymphocyte Reaction (MLR) by gene products (e.g., isolated polypeptides). Inhibition of a MLR may be due to a direct effect on cell proliferation and viability, modulation of costimulatory molecules on interacting cells, modulation of adhesiveness between lymphocytes and accessory cells, or modulation of cytokine production by accessory cells. Multiple cells may be targeted by these polypeptides since the peripheral blood mononuclear fraction used in this assay includes T, B and natural killer lymphocytes, as well as monocytes and dendritic cells.

[1345] Polypeptides of interest found to inhibit the MLR may find application in diseases associated with lymphocyte and monocyte activation or proliferation. These include, but are not limited to, diseases such as asthma, arthritis, diabetes, inflammatory skin conditions, psoriasis, eczema, systemic lupus erythematosus, multiple sclerosis, glomerulonephritis, inflammatory bowel disease, crohn's disease, ulcerative colitis, arteriosclerosis, cirrhosis, graft vs. host disease, host vs. graft disease, hepatitis, leukemia and lymphoma.

[1346] Briefly, PBMCs from human donors are purified by density gradient centrifugation using Lymphocyte Separation Medium (LSM®, density 1.0770 g/ml, Organon Teknika Corporation, West Chester, Pa.). PBMCs from two donors are adjusted to 2×10⁶ cells/ml in RPMI-1640 (Life Technologies, Grand Island, N.Y.) supplemented with 10% FCS and 2 mM glutamine. PBMCs from a third donor is adjusted to 2×10⁵ cells/ml. Fifty microliters of PBMCs from each donor is added to wells of a 96-well round bottom microtiter plate. Dilutions of test materials (50 μl) is added in triplicate to microtiter wells. Test samples (of the protein of interest) are added for final dilution of 1:4; rhuIL-2 (R&D Systems, Minneapolis, Minn., catalog number 202-IL) is added to a final concentration of 1 μg/ml; anti-CD4 mAb (R&D Systems, clone 34930.11, catalog number MAB379) is added to a final concentration of 10 μg/ml. Cells are cultured for 7-8 days at 37° C. in 5% CO₂, and 1 μC of [³H] thymidine is added to wells for the last 16 hrs of culture. Cells are harvested and thymidine incorporation determined using a Packard TopCount. Data is expressed as the mean and standard deviation of triplicate determinations.

[1347] Samples of the protein of interest are screened in separate experiments and compared to the negative control treatment, anti-CD4 mAb, which inhibits proliferation of lymphocytes and the positive control treatment, IL-2 (either as recombinant material or supernatant), which enhances proliferation of lymphocytes.

[1348] One skilled in the art could easily modify the exemplified studies to test the activity of polynucleotides (e.g., gene therapy), antibodies, agonists, and/or antagonists and fragments and variants thereof.

### Example 46

[1349] Assays for Protease Activity

[1350] The following assay may be used to assess protease activity of the polypeptides of the invention.

[1351] Gelatin and casein zymography are performed essentially as described (Heusen et al., Anal. Biochem., 102:196-202 (1980); Wilson et al., Journal of Urology, 149:653-658 (1993)). Samples are run on 10% polyacryamide/0.1% SDS gels containing 1% gelain orcasein, soaked in 2.5% triton at room temperature for 1 hour, and in 0.1M glycine, pH 8.3 at 37° C. 5 to 16 hours. After staining in amido black areas of proteolysis apear as clear areas agains the blue-black background. Trypsin (Sigma T8642) is used as a positive control.

[1352] Protease activity is also determined by monitoring the cleavage of n-a-benzoyl-L-arginine ethyl ester (BAEE) (Sigma B-4500. Reactions are set up in (25 mMNaPO₄, 1mM EDTA, and 1 mM BAEE), pH 7.5. Samples are added and the change in adsorbance at 260 nm is monitored on the Beckman DU-6 spectrophotometer in the time-drive mode. Trypsin is used as a positive control.

[1353] Additional assays based upon the release of acid-soluble peptides from casein or hemoglobin measured as adsorbance at 280 nm or calorimetrically using the Folin method are performed as described in Bergmeyer, et al., Methods of Enzymatic Analysis, 5 (1984). Other assays involve the solubilization of chromogenic substrates (Ward, Applied Science, 251-317 (1983).

### Example 47

[1354] Identifying Serine Protease Substrate Specificity

[1355] Methods known in the art or described herein may be used to determine the substrate specificity of the polypeptides of the present invention having serine protease activity. A preferred method of determining substrate specificity is by the use of positional scanning synthetic combinatorial libraries as described in GB 2 324 529 (incorporated herein in its entirety).

### Example 48

[1356] Ligand Binding Assays

[1357] The following assay may be used to assess ligand binding activity of the polypeptides of the invention.

[1358] Ligand binding assays provide a direct method for ascertaining receptor pharmacology and are adaptable to a high throughput format. The purified ligand for a polypeptide is radiolabeled to high specific activity (50-2000 Ci/mmol) for binding studies. A determination is then made that the process of radiolabeling does not diminish the activity of the ligand towards its polypeptide. Assay conditions for buffers, ions, pH and other modulators such as nucleotides are optimized to establish a workable signal to noise ratio for both membrane and whole cell polypeptide sources. For these assays, specific polypeptide binding is defined as total associated radioactivity minus the radioactivity measured in the presence of an excess of unlabeled competing ligand. Where possible, more than one competing ligand is used to define residual nonspecific binding.

### Example 49

[1359] Functional Assay in Xenopus Oocytes

[1360] Capped RNA transcripts from linearized plasmid templates encoding the polypeptides of the invention are synthesized in vitro with RNA polymerases in accordance with standard procedures. In vitro transcripts are suspended in water at a final concentration of 0.2 mg/mi. Ovarian lobes are removed from adult female toads, Stage V defolliculated oocytes are obtained, and RNA transcripts (10 ng/oocytc) are injected in a 50 nl bolus using a microinjection apparatus. Two electrode voltage clamps are used to measure the currents from individual Xenopts oocytes in response polypeptides and polypeptide agonist exposure. Recordings are made in Ca2+ free Barth's medium at room temperature. The Xenopus system can be used to screen known ligands and tissue/cell extracts for activating ligands.

### Example 50

[1361] Microphysiometric Assays

[1362] Activation of a wide variety of secondary messenger systems results in extrusion of small amounts of acid from a cell. The acid formed is largely as a result of the increased metabolic activity required to fuel the intracellular signaling process. The pH changes in the media surrounding the cell are very small but are detectable by the CYTOSENSOR microphysiometer (Molecular Devices Ltd., Menlo Park, Calif.). The CYTOSENSOR is thus capable of detecting the activation of polypeptide which is coupled to an energy utilizing intracellular signaling pathway.

### Example 51

[1363] Extract/Cell Supernatant Screening

[1364] A large number of mammalian receptors exist for which there remains, as yet, no cognate activating ligand (agonist). Thus, active ligands for these receptors may not be included within the ligands banks as identified to date. Accordingly, the polypeptides of the invention can also be functionally screened (using calcium, cAMP, microphysiometer, oocyte electrophysiology, etc., functional screens) against tissue extracts to identify its natural ligands. Extracts that produce positive functional responses can be sequentially subfractionated until an activating ligand is isolated and identified.

### Example 52

[1365] Calcium and cAMP Functional Assays

[1366] Seven transmembrane receptors which are expressed in HEK 293 cells have been shown to be coupled functionally to activation of PLC and calcium mobilization and/or cAMP stimulation or inhibition. Basal calcium levels in the HEK 293 cells in receptor-transfected or vector control cells were observed to be in the normal, 100 nM to 200 nM, range. HEK 293 cells expressing recombinant receptors are loaded with fura 2 and in a single day >150 selected ligands or tissue/cell extracts are evaluated for agonist induced calcium mobilization. Similarly, HEK 293 cells expressing recombinant receptors are evaluated for the stimulation or inhibition of cAMP production using standard cAMP quantitation assays. Agonists presenting a calcium transient or cAMP fluctuation are tested in vector control cells to determine if the response is unique to the transfected cells expressing receptor.

### Example 53

[1367] ATP-binding Assay

[1368] The following assay may be used to assess ATP-binding activity of polypeptides of the invention.

[1369] ATP-binding activity of the polypeptides of the invention may be detected using the ATP-binding assay described in U.S. Pat. No. 5,858,719, which is herein incorporated by reference in its entirety. Briefly, ATP-binding to polypeptides of the invention is measured via photoaffinity labeling with 8-azido-ATP in a competition assay. Reaction mixtures containing 1 mg/ml of the ABC transport protein of the present invention are incubated with varying concentrations of ATP, or the non-hydrolyzable ATP analog adenyl-5′-imidodiphosphate for 10 minutes at 4° C. A mixture of 8-azido-ATP (Sigma Chem. Corp., St. Louis, Mo.) plus 8-azido-ATP (³²P-ATP) (5 mCi/μmol, ICN, Irvine Calif.) is added to a final concentration of 100 μM and 0.5 ml aliquots are placed in the wells of a porcelain spot plate on ice. The plate is irradiated using a short wave 254 nm UV lamp at a distance of 2.5 cm from the plate for two one-minute intervals with a one-minute cooling interval in between. The reaction is stopped by addition of dithiothreitol to a final concentration of 2 mM. The incubations are subjected to SDS-PAGE electrophoresis, dried, and autoradiographed. Protein bands corresponding to the particular polypeptides of the invention are excised, and the radioactivity quantified. A decrease in radioactivity with increasing ATP or adenly-5′-imidodiphosphate provides a measure of ATP affinity to the polypeptides.

### Example 54

[1370] Small Molecule Screening

[1371] This invention is particularly useful for screening therapeutic compounds by using the polypeptides of the invention, or binding fragments thereof, in any of a variety of drug screening techniques. The polypeptide or fragment employed in such a test may be affixed to a solid support, expressed on a cell surface, free in solution, or located intracellularly. One method of drug screening utilizes eukaryotic or prokaryotic host cells which are stably transformed with recombinant nucleic acids expressing the polypeptide or fragment. Drugs are screened against such transformed cells in competitive binding assays. One may measure, for example, the formulation of complexes between the agent being tested and polypeptide of the invention.

[1372] Thus, the present invention provides methods of screening for drugs or any other agents which affect activities mediated by the polypeptides of the invention. These methods comprise contacting such an agent with a polypeptide of the invention or fragment thereof and assaying for the presence of a complex between the agent and the polypeptide or fragment thereof, by methods well known in the art. In such a competitive binding assay, the agents to screen are typically labeled. Following incubation, free agent is separated from that present in bound form, and the amount of free or uncomplexed label is a measure of the ability of a particular agent to bind to the polypeptides of the invention.

[1373] Another technique for drug screening provides high throughput screening for compounds having suitable binding affinity to the polypeptides of the invention, and is described in great detail in European Patent Application 84/03564, published on Sep. 13, 1984, which is herein incorporated by reference in its entirety. Briefly stated, large numbers of different small molecule test compounds are synthesized on a solid substrate, such as plastic pins or some other surface. The test compounds are reacted with polypeptides of the invention and washed. Bound polypeptides are then detected by methods well known in the art. Purified polypeptides are coated directly onto plates for use in the aforementioned drug screening techniques. In addition, non-neutralizing antibodies may be used to capture the peptide and immobilize it on the solid support.

[1374] This invention also contemplates the use of competitive drug screening assays in which neutralizing antibodies capable of binding polypeptides of the invention specifically compete with a test compound for binding to the polypeptides or fragments thereof. In this manner, the antibodies are used to detect the presence of any peptide which shares one or more antigenic epitopes with a polypeptide of the invention.

### Example 55

[1375] Phosphorylation Assay

[1376] In order to assay for phosphorylation activity of the polypeptides of the invention, a phosphorylation assay as described in U.S. Pat. No. 5,958,405 (which is herein incorporated by reference) is utilized. Briefly, phosphorylation activity may be measured by phosphorylation of a protein substrate using gamma-labeled ³²P-ATP and quantitation of the incorporated radioactivity using a gamma radioisotope counter. The polypeptides of the invention are incubated with the protein substrate, ³²P-ATP, and a kinase buffer. The ³²P incorporated into the substrate is then separated from free 32P-ATP by electrophoresis, and the incorporated ³²P is counted and compared to a negative control. Radioactivity counts above the negative control are indicative of phosphorylation activity of the polypeptides of the invention.

### Example 56

[1377] Detection of Phosphorylation Activity (Activation) of the Polypeptides of the Invention in the Presence of Polypeptide Ligands

[1378] Methods known in the art or described herein may be used to determine the phosphorylation activity of the polypeptides of the invention. A preferred method of determining phosphorylation activity is by the use of the tyrosine phosphorylation assay as described in U.S. Pat. No. 5,817,471 (incorporated herein by reference).

### Example 57

[1379] Identification of Signal Transduction Proteins that Interact with Polypeptides of the Present Invention

[1380] The purified polypeptides of the invention are research tools for the identification, characterization and purification of additional signal transduction pathway proteins or receptor proteins. Briefly, labeled receptor PTK polypeptide is useful as a reagent for the purification of molecules with which it interacts. In one embodiment of affinity purification, receptor PTK polypeptide is covalently coupled to a chromatography column. Cell-free extract derived from putative target cells, such as carcinoma tissues, is passed over the column, and molecules with appropriate affinity bind to the receptor PTK polypeptides, or specific phosphotyrosine-recognition domains thereof. The receptor PTK polypeptide interacting protein-complex is recovered from the column, dissociated, and the recovered molecule subjected to N-terminal protein sequencing. This amino acid sequence is then used to identify the captured molecule or to design degenerate oligonucleotide probes for cloning the relevant gene from an appropriate cDNA library.

### Example 58

[1381] IL-6 Bioassay

[1382] To test the proliferative effects of the polypeptides of the invention, the IL-6 Bioassay as described by Marz et al. is utilized (Proc. Natl. Acad. Sci., U.S.A., 95:3251-56 (1998), which is herein incorporated by reference). Briefly, IL-6 dependent B9 murine cells are washed three times in IL-6 free medium and plated at a concentration of 5,000 cells per well in 50 μl, and 50 μl of the IL-6-like polypeptide is added. After 68 hrs. at 37° C., the number of viable cells is measured by adding the tetrazolium salt thiazolyl blue (MTT) and incubating for a further 4 hrs. at 37° C. B9 cells are lysed by SDS and optical density is measured at 570 nm. Controls containing IL-6 (positive) and no cytokine (negative) are utilized. Enhanced proliferation in the test sample(s) relative to the negative control is indicative of proliferative effects mediated by polypeptides of the invention.

### Example 59

[1383] Support of Chicken Embryo Neuron Survival

[1384] To test whether sympathetic neuronal cell viability is supported by polypeptides of the invention, the chicken embryo neuronal survival assay of Senaldi et al is utilized (Proc. Natl. Acad. Sci., U.S.A., 96:11458-63 (1998), which is herein incorporated by reference). Briefly, motor and sympathetic neurons are isolated from chicken embryos, resuspended in L15 medium (with 10% FCS, glucose, sodium selenite, progesterone, conalbumin, putrescine, and insulin; Life Technologies, Rockville, Md.) and Dulbecco's modified Eagles medium [with 10% FCS, glutamine, penicillin, and 25 mM Hepes buffer (pH 7.2); Life Technologies, Rockville, Md.], respectively, and incubated at 37° C. in 5% CO₂ in the presence of different concentrations of the purified IL-6-like polypeptide, as well as a negative control lacking any cytokine. After 3 days, neuron survival is determined by evaluation of cellular morphology, and through the use of the calorimetric assay of Mosmann (Mossman, T., J. Immunol. Methods, 65:55-63 (1983)). Enhanced neuronal cell viability as compared to the controls lacking cytokine is indicative of the ability of the inventive purified IL-6-like polypeptide(s) to enhance the survival of neuronal cells.

### Example 60

[1385] Assay for Phosphatase Activity

[1386] The following assay may be used to assess serine/threonine phosphatase (PTPase) activity of the polypeptides of the invention.

[1387] In order to assay for serine/threonine phosphatase (PTPase) activity, assays can be utilized which are widely known to those skilled in the art. For example, the serine/threonine phosphatase (PSPase) activity is measured using a PSPase assay kit from New England Biolabs, Inc. Myelin basic protein (MyBP), a substrate for PSPase, is phosphorylated on serine and threonine residues with cAMP-dependent Protein Kinase in the presence of [³²P]ATP. Protein serine/threonine phosphatase activity is then determined by measuring the release of inorganic phosphate from 32P-labeled MyBP.

### Example 61

[1388] Interaction of Serine/Threonine Phosphatases with Other Proteins

[1389] The polypeptides of the invention with serine/threonine phosphatase activity as determined in Example 60 are research tools for the identification, characterization and purification of additional interacting proteins or receptor proteins, or other signal transduction pathway proteins. Briefly, labeled polypeptide(s) of the invention is useful as a reagent for the purification of molecules with which it interacts. In one embodiment of affinity purification, polypeptide of the invention is covalently coupled to a chromatography column. Cell-free extract derived from putative target cells, such as neural or liver cells, is passed over the column, and molecules with appropriate affinity bind to the polypeptides of the invention. The polypeptides of the invention -complex is recovered from the column, dissociated, and the recovered molecule subjected to N-terminal protein sequencing. This amino acid sequence is then used to identify the captured molecule or to design degenerate oligonucleotide probes for cloning the relevant gene from an appropriate cDNA library.

### Example 62

[1390] Assaying for Heparanase Activity

[1391] In order to assay for heparanase activity of the polypeptides of the invention, the heparanase assay described by Vlodavsky et al is utilized (Vlodavsky, I., et al., Nat. Med., 5:793-802 (1999)). Briefly, cell lysates, conditioned media or intact cells (1×10⁶ cells per 35-mm dish) are incubated for 18 hrs at 37° C., pH 6.2-6.6, with ³⁵S-labeled ECM or soluble ECM derived peak I proteoglycans. The incubation medium is centrifuged and the supernatant is analyzed by gel filtration on a Sepharose CL-6B column (0.9×30 cm). Fractions are eluted with PBS and their radioactivity is measured. Degradation fragments of heparan sulfate side chains are eluted from Sepharose 6B at 0.5<Kₐᵥ<0.8 (peak II). Each experiment is done at least three times. Degradation fragments corresponding to “peak II,” as described by Vlodavsky et al., is indicative of the activity of the polypeptides of the invention in cleaving heparan sulfate.

### Example 63

[1392] Immobilization of Biomolecules

[1393] This example provides a method for the stabilization of polypeptides of the invention in non-host cell lipid bilayer constucts (see, e.g., Bieri et al., Nature Biotech 17:1105-1108 (1999), hereby incorporated by reference in its entirety herein) which can be adapted for the study of polypeptides of the invention in the various functional assays described above. Briefly, carbohydrate-specific chemistry for biotinylation is used to confine a biotin tag to the extracellular domain of the polypeptides of the invention, thus allowing uniform orientation upon immobilization. A 50 uM solution of polypeptides of the invention in washed membranes is incubated with 20 mM NaIO4 and 1.5 mg/ml (4 mM) BACH or 2 mg/ml (7.5 mM) biotin-hydrazide for 1 hr at room temperature (reaction volume, 150 ul). Then the sample is dialyzed (Pierce Slidealizer Cassett, 10 kDa cutoff; Pierce Chemical Co., Rockford Ill.) at 4° C. first for 5 h, exchanging the buffer after each hour, and finally for 12 h against 500 ml buffer R (0.15 M NaCl, 1 mM MgCl2, 10 mM sodium phosphate, pH7). Just before addition into a cuvette, the sample is diluted 1:5 in buffer ROG50 (Buffer R supplemented with 50 mM octylglucoside).

### Example 64

[1394] TAQMAN

[1395] Quantitative PCR (QPCR). Total RNA from cells in culture are extracted by Trizol separation as recommended by the supplier (LifeTechnologies). (Total RNA is treated with DNase I (Life Technologies) to remove any contaminating genomic DNA before reverse transcription.) Total RNA (50 ng) is used in a one-step, 50 ul, RT-QPCR, consisting of Taqman Buffer A (Perkin-Elmer; 50 mM KCl/10 mM Tris, pH 8.3), 5.5 mM MgCl₂, 240 μM each dNTP, 0.4 units RNase inhibitor(Promega), 8% glycerol, 0.012% Tween-20, 0.05% gelatin, 0.3 uM primers, 0.1 uM probe, 0.025 units Amplitaq Gold (Perkin-Elmer) and 2.5 units Superscript II reverse transcriptase (Life Technologies). As a control for genomic contamination, parallel reactions are setup without reverse transcriptase. The relative abundance of (unknown) and 18S RNAs are assessed by using the Applied Biosystems Prism 7700 Sequence Detection System (Livak, K. J., Flood, S. J., Marmaro, J., Giusti, W. & Deetz, K. (1995) PCR Methods Appl. 4, 357-362). Reactions are carried out at 48° C. for 30 min, 95° C. for 10 min, followed by 40 cycles of 95° C. for 15s, 60° C. for 1 min. Reaction performed in triplicate.

[1396] Primers (f & r) and FRET probes sets are designed using Primer Express Software (Perkin-Elmer). Probes are labeled at the 5′-end with the reporter dye 6-FAM and on the 3′-end with the quencher dye TAMRA (Biosource International, Camarillo, Calif. or Perkin-Elmer).

### Example 65

[1397] Assays for Metalloproteinase Activity

[1398] Metalloproteinases (EC 3.4.24.-) are peptide hydrolases which use metal ions, such as Zn²⁺, as the catalytic mechanism. Metalloproteinase activity of polypeptides of the present invention can be assayed according to the following methods.

[1399] Proteolysis of Alpha-2-macroglobulin

[1400] To confirm protease activity, purified polypeptides of the invention are mixed with the substrate alpha-2-macroglobulin (0.2 unit/ml; Boehringer Mannheim, Germany) in 1× assay buffer (50 mM HEPES, pH 7.5, 0.2 M NaCl, 10 mM CaCl₂, 25 μM ZnCl₂ and 0.05% Brij-35) and incubated at 37° C. for 1-5 days. Trypsin is used as positive control. Negative controls contain only alpha-2-macroglobulin in assay buffer. The samples are collected and boiled in SDS-PAGE sample buffer containing 5% 2-mercaptoethanol for 5-min, then loaded onto 8% SDS-polyacrylamide gel. After electrophoresis the proteins are visualized by silver staining. Proteolysis is evident by the appearance of lower molecular weight bands as compared to the negative control.

[1401] Inhibition of Alpha-2-macroglobulin Proteolysis by Inhibitors of Metalloproteinases

[1402] Known metalloproteinase inhibitors (metal chelators (EDTA, EGTA, AND HgCl₂), peptide metalloproteinase inhibitors (TIMP-1 and TIMP-2), and commercial small molecule MMP inhibitors) are used to characterize the proteolytic activity of polypeptides of the invention. The three synthetic MMP inhibitors used are: MMP inhibitor I, [IC₅₀=1.0 μM against MMP-1 and MMP-8; IC₅₀=30 μM against MMP-9; IC₅₀=150 μM against MMP-3]; MMP-3 (stromelysin-1) inhibitor I [IC₅₀=5 μM against MMP-3], and MMP-3 inhibitor II [Kᵢ=130 nM against MMP-3]; inhibitors available through Calbiochem, catalog # 444250, 444218, and 444225, respectively). Briefly, different concentrations of the small molecule MMP inhibitors are mixed with purified polypeptides of the invention (50 μg/ml) in 22.9 μl of 1× HEPES buffer (50 mM HEPES, pH 7.5, 0.2 M NaCl, 10 mM CaCl₂, 25 μM ZnCl₂ and 0.05% Brij-35) and incubated at room temperature (24° C.) for 2-hr, then 7.1 μl of substrate alpha-2-macroglobulin (0.2 unit/ml) is added and incubated at 37° C. for 20-hr. The reactions are stopped by adding 4× sample buffer and boiled immediately for 5 minutes. After SDS-PAGE, the protein bands are visualized by silver stain.

[1403] Synthetic Fluorogenic Peptide Substrates Cleavage Assay

[1404] The substrate specificity for polypeptides of the invention with demonstrated metalloproteinase activity can be determined using synthetic fluorogenic peptide substrates (purchased from BACHEM Bioscience Inc). Test substrates include, M-1985, M-2225, M-2105, M-2110, and M-2255. The first four are MMP substrates and the last one is a substrate of tumor necrosis factor-α (TNF-α) converting enzyme (TACE). All the substrates are prepared in 1:1 dimethyl sulfoxide (DMSO) and water. The stock solutions are 50-500 μM. Fluorescent assays are performed by using a Perkin Elmer LS 50B luminescence spectrometer equipped with a constant temperature water bath. The excitation λ is 328 nm and the emission λ is 393 nm. Briefly, the assay is carried out by incubating 176 μl 1× HEPES buffer (0.2 M NaCl, 10 mM CaCl₂, 0.05% Brij-35 and 50 mM HEPES, pH 7.5) with 4 μl of substrate solution (50 μM) at 25° C. for 15 minutes, and then adding 20 μl of a purified polypeptide of the invention into the assay cuvett. The final concentration of substrate is 1 μM. Initial hydrolysis rates are monitored for 30-min.

### Example 66

[1405] Characterization of the cDNA Contained in a Deposited Plasmid

[1406] The size of the cDNA insert contained in a deposited plasmid may be routinely determined using techniques known in the art, such as PCR amplification using synthetic primers hybridizable to the 3′ and 5′ ends of the cDNA sequence. For example, two primers of 17-30 nucleotides derived from each end of the cDNA (i.e., hybridizable to the absolute 5′ nucleotide or the 3′ nucleotide end of the sequence of SEQ ID NO:X, respectively) are synthesized and used to amplify the cDNA using the deposited cDNA plasmid as a template. The polymerase chain reaction is carried out under routine conditions, for instance, in 25 ul of reaction mixture with 0.5 ug of the above cDNA template. A convenient reaction mixture is 1.5-5 mM MgCl₂, 0.01% (w/v) gelatin, 20 uM each of dATP, dCTP, dGTP, dTTP, 25 pmol of each primer and 0.25 Unit of Taq polymerase. Thirty five cycles of PCR (denaturation at 94 degree C. for 1 min; annealing at 55 degree C. for 1 min; elongation at 72 degree C. for 1 min) are performed with a Perkin-Elmer Cetus automated thermal cycler. The amplified product is analyzed by agarose gel electrophoresis. The PCR product is verified to be the selected sequence by subcloning and sequencing the DNA product.

[1407] Use of the above methodologies and/or other methodologies known in the art generates fragments from the clone corresponding to the approximate fragments described in Table 8, below. Accordingly, Table 8 provides a physical characterization of certain clones encompassed by the invention. The first column provides the unique clone identifier, “Clone ID NO:Z”, for cDNA clones of the invention, as described in Table 1A. The second column provides the approximate size of the cDNA insert contained in the corresponding cDNA clone.

TABLE 8

| | |
|---|---|
| | cDNA |
| Clone ID | Insert |
| NO: Z | Size: |

No Entries

[1408] It will be clear that the invention may be practiced otherwise than as particularly described in the foregoing description and examples. Numerous modifications and variations of the present invention are possible in light of the above teachings and, therefore, are within the scope of the appended claims.

[1409] The entire disclosure of each document cited (including patents, patent applications, journal articles, abstracts, laboratory manuals, books, or other disclosures) in the Background of the Invention, Detailed Description, and Examples is hereby incorporated herein by reference. In addition, the CD-R copy of the sequence listing submitted herewith and the corresponding computer readable form are both incorporated herein by reference in their entireties. The specification and Sequence Listing of each of the following U.S. applications are herein incorporated by reference in their entirety: application Ser. No. 60/179,065, filed on Jan. 31, 2000; application Ser. No. 60/180,628, filed on Feb. 4, 2000; application Ser. No. 60/214,886, filed on Jun. 28, 2000; application Ser. No. 60/217,487, filed on Jul. 11, 2000; application Ser. No. 60/225,758, filed on Aug. 14, 2000; application Ser. No. 60/220,963, filed on Jul. 26, 2000; application Ser. No. 60/217,496, filed on Jul. 11, 2000; application Ser. No. 60/225,447, filed on Aug. 14, 2000; application Ser. No. 60/218,290, filed on Jul. 14, 2000; application Ser. No. 60/225,757 , filed on Aug. 14, 2000; application Ser. No. 60/226,868, filed on Aug. 22, 2000; application Ser. No. 60/216,647, filed on Jul. 7, 2000; application Ser. No. 60/225,267, filed on Aug. 14, 2000; application Ser. No. 60/216,880, filed on Jul. 7, 2000; application Ser. No. 60/225,270, filed on Aug. 14, 2000; application Ser. No. 60/251,869, filed on Dec. 8, 2000; application Ser. No. 60/235,834, filed on Sep. 27, 2000; application Ser. No. 60/234,274, filed on Sep. 21, 2000; application Ser. No. 60/234,223, filed on Sep. 21, 2000; application Ser. No. 60/228,924, filed on Aug. 30, 2000; application Ser. No. 60/224,518, filed on Aug. 14, 2000; application Ser. No. 60/236,369, filed on Sep. 29, 2000; application Ser. No. 60/224,519, filed on Aug. 14, 2000; application Ser. No. 60/220,964, filed on Jul. 26, 2000; application Ser. No. 60/241,809, filed on Oct. 20, 2000; application Ser. No. 60/249,299, filed on Nov. 17, 2000; application Ser. No. 60/236,327, filed on Sep. 29, 2000; application Ser. No. 60/241,785, filed on Oct. 20, 2000; application Ser. No. 60/244,617, filed on Nov. 1, 2000; application Ser. No. 60/225,268, filed on Aug. 14, 2000; application Ser. No. 60/236,368, filed on Sep. 29, 2000; application Ser. No. 60/251,856, filed on Dec. 8, 2000; application Ser. No. 60/251,868, filed on Dec. 8, 2000; application Ser. No. 60/229,344, filed on Sep. 1, 2000; application Ser. No. 60/234,997, filed on Sep. 25, 2000; application Ser. No. 60/229,343, filed on Sep. 1, 2000; application Ser. No. 60/229,345, filed on Sep. 1, 2000; application Ser. No. 60/229,287, filed on Sep. 1, 2000; application Ser. No. 60/229,513, filed on Sep. 5, 2000; application Ser. No. 60/231,413, filed on Sep. 8, 2000; application Ser. No. 60/229,509, filed on Sep. 5, 2000; application Ser. No. 60/236,367, filed on Sep. 29, 2000; application Ser. No. 60/237,039, filed on Oct. 2, 2000; application Ser. No. 60/237,038, filed on Oct. 2, 2000; application Ser. No. 60/236,370, filed on Sep. 29, 2000; application Ser. No. 60/236,802, filed on Oct. 2, 2000; application Ser. No. 60/237,037, filed on Oct. 2, 2000; application Ser. No. 60/237,040, filed on Oct. 2, 2000; application Ser. No. 60/240,960, filed on Oct. 20, 2000; application Ser. No. 60/239,935, filed on Oct. 13, 2000; application Ser. No. 60/239,937, filed on Oct. 13, 2000; application Ser. No. 60/241,787, filed on Oct. 20, 2000; application Ser. No. 60/246,474, filed on Nov. 8, 2000; application Ser. No. 60/246,532, filed on Nov. 8, 2000; application Ser. No. 60/249,216, filed on Nov. 17, 2000; application Ser. No. 60/249,210, filed on Nov. 17, 2000; application Ser. No. 60/226,681, filed on Aug. 22, 2000; application Ser. No. 60/225,759, filed on Aug. 14, 2000; application Ser. No. 60/225,213, filed on Aug. 14, 2000; application Ser. No. 60/227,182, filed on Aug. 22, 2000; application Ser. No. 60/225,214, filed on Aug. 14, 2000; application Ser. No. 60/235,836, filed on Sep. 27, 2000; application Ser. No. 60/230,438, filed on Sep. 6, 2000; application Ser. No. 60/215,135, filed on Jun. 30, 2000; application Ser. No. 60/225,266, filed on Aug. 14, 2000; application Ser. No. 60/249,218, filed on Nov. 17, 2000; application Ser. No. 60/249,208, filed on Nov. 17, 2000; application Ser. No. 60/249,213, filed on Nov. 17, 2000; application Ser. No. 60/249,212, filed on Nov. 17, 2000; application Ser. No. 60/249,207, filed on Nov. 17, 2000; application Ser. No. 60/249,245, filed on Nov. 17, 2000; application Ser. No. 60/249,244, filed on Nov. 17, 2000; application Ser. No. 60/249,217, filed on Nov. 17, 2000; application Ser. No. 60/249,211, filed on Nov. 17, 2000; application Ser. No. 60/249,215, filed on Nov. 17, 2000; application Ser. No. 60/249,264, filed on Nov. 17, 2000; application Ser. No. 60/249,214, filed on Nov. 17, 2000; application Ser. No. 60/249,297, filed on Nov. 17, 2000; application Ser. No. 60/232,400, filed on Sep. 14, 2000; application Ser. No. 60/231,242, filed on Sep. 8, 2000; application Ser. No. 60/232,081, filed on Sep 8, 2000; application Ser. No. 60/232,080, filed on Sep. 8, 2000; application Ser. No. 60/231,414, filed on Sep. 8, 2000; application Ser. No. 60/231,244, filed on Sep. 8, 2000; application Ser. No. 60/233,064, filed on Sep. 14, 2000; application Ser. No. 60/233,063, filed on Sep. 14, 2000; application Ser. No. 60/232,397, filed on Sep. 14, 2000; application Ser. No. 60/232,399, filed on Sep. 14, 2000; application Ser. No. 60/232,401, filed on Sep. 14, 2000; application Ser. No. 60/241,808, filed on Oct. 20, 2000; application Ser. No. 60/241,826, filed on Oct. 20, 2000; application Ser. No. 60/241,786, filed on Oct. 20, 2000; application Ser. No. 60/241,221, filed on Oct. 20, 2000; application Ser. No. 60/246,475, filed on Nov. 8, 2000; application Ser. No. 60/231,243, filed on Sep. 8, 2000; application Ser. No. 60/233,065, filed on Sep. 14, 2000; application Ser. No. 60/232,398, filed on Sep. 14, 2000; application Ser. No. 60/234,998, filed on Sep. 25, 2000; application Ser. No. 60/246,477, filed on Nov. 8, 2000; application Ser. No. 60/246,528, filed on Nov. 8, 2000; application Ser. No. 60/246,525, filed on Nov. 8, 2000; application Ser. No. 60/246,476, filed on Nov. 8, 2000; application Ser. No. 60/246,526, filed on Nov. 8, 2000; application Ser. No. PT172, filed on Nov. 17, 2000; application Ser. No. 60/246,527, filed on Nov. 8, 2000; application Ser. No. 60/246,523, filed on Nov. 8, 2000; application Ser. No. 60/246,524, filed on Nov. 8, 2000; application Ser. No. 60/246,478, filed on Nov. 8, 2000; application Ser. No. 60/246,609, filed on Nov. 8, 2000; application Ser. No. 60/246,613, filed on Nov. 8, 2000; application Ser. No. 60/249,300, filed on Nov. 17, 2000; application Ser. No. 60/249,265, filed on Nov. 17, 2000; application Ser. No. 60/246,610, filed on Nov. 8, 2000; application Ser. No. 60/246,611, filed on Nov. 8, 2000; application Ser. No. 60/230,437, filed on Sep. 6, 2000; application Ser. No. 60/251,990, filed on Dec. 8, 2000; application Ser. No. 60/251,988, filed on Dec. 5, 2000; application Ser. No. 60/251,030, filed on Dec. 5, 2000; application Ser. No. 60/251,479, filed on Dec. 6, 2000; application Ser. No. PJ005, filed on Dec. 5, 2000; application Ser. No. PJ006, filed on Dec. 1, 2000; application Ser. No. 60/251,989, filed on Dec. 8, 2000; application Ser. No. 60/250,391, filed on Dec. 1, 2000; and application Ser. No. 60/254,097, filed on Dec. 11, 2000.

[1410] Moreover, the microfiche copy and the corresponding computer readable form of the Sequence Listing of U.S. application Ser. No. 60/179,065, and the hard copy of and the corresponding computer readable form of the Sequence Listing of U.S. application Ser. No. 60/180,628 are also incorporated herein by reference in their entireties.

The application's sequence listing, which the Patent Office published only in electronic form, follows.

SEQUENCE LISTING (957 sequences)

SEQ ID NO: 1 - DNA, 733 bp, Homo sapiens
gggatccggagcccaaatcttctgacaaaactcacacatgcccaccgtgcccagcacctgaattcgagggtgcaccgtcagtcttcctcttccccccaaaacccaaggacaccctcatgatctcccggactcctgaggtcacatgcgtggtggtggacgtaagccacgaagaccctgaggtcaagttcaactggtacgtggacggcgtggaggtgcataatgccaagacaaagccgcgggaggagcagtacaacagcacgtaccgtgtggtcagcgtcctcaccgtcctgcaccaggactggctgaatggcaaggagtacaagtgcaaggtctccaacaaagccctcccaacccccatcgagaaaaccatctccaaagccaaagggcagccccgagaaccacaggtgtacaccctgcccccatcccgggatgagctgaccaagaaccaggtcagcctgacctgcctggtcaaaggcttctatccaagcgacatcgccgtggagtgggagagcaatgggcagccggagaacaactacaagaccacgcctcccgtgctggactccgacggctccttcttcctctacagcaagctcaccgtggacaagagcaggtggcagcaggggaacgtcttctcatgctccgtgatgcatgaggctctgcacaaccactacacgcagaagagcctctccctgtctccgggtaaatgagtgcgacggccgcgactctagaggat

SEQ ID NO: 2 - protein, 5 aa, Homo sapiens
  Site (3): Xaa equals any of the twenty naturally ocurring L-amino acids
WSXWS

SEQ ID NO: 3 - DNA, 86 bp, Artificial Sequence
  Primer_Bind: Synthetic sequence with 4 tandem copies of the GAS binding site found in the IRF1 promoter (Rothman et al., Immunity 1:457-468 (1994)), 18 nucleotides complementary to the SV40 early promoter, and a Xho I restriction site.
gcgcctcgagatttccccgaaatctagatttccccgaaatgatttccccgaaatgatttccccgaaatatctgccatctcaattag

SEQ ID NO: 4 - DNA, 27 bp, Artificial Sequence
  Primer_Bind: Synthetic sequence complementary to the SV40 promter; includes a Hind III restriction site.
gcggcaagctttttgcaaagcctaggc

SEQ ID NO: 5 - DNA, 271 bp, Artificial Sequence
  Protein_Bind: Synthetic promoter for use in biological assays; includes GAS binding sites found in the IRF1 promoter (Rothman et al., Immunity 1:457-468 (1994)).
ctcgagatttccccgaaatctagatttccccgaaatgatttccccgaaatgatttccccgaaatatctgccatctcaattagtcagcaaccatagtcccgcccctaactccgcccatcccgcccctaactccgcccagttccgcccattctccgccccatggctgactaattttttttatttatgcagaggccgaggccgcctcggcctctgagctattccagaagtagtgaggaggcttttttggaggcctaggcttttgcaaaaagctt

SEQ ID NO: 6 - DNA, 32 bp, Artificial Sequence
  Primer_Bind: Synthetic primer complementary to human genomic EGR-1 promoter sequence (Sakamoto et al., Oncogene 6:867-871 (1991)); includes a Xho I restriction site.
gcgctcgagggatgacagcgatagaaccccgg

SEQ ID NO: 7 - DNA, 31 bp, Artificial Sequence
  Primer_Bind: Synthetic primer complementary to human genomic EGR-1 promoter sequence (Sakamoto et al., Oncogene 6:867-871 (1991)); includes a Hind III restriction site.
gcgaagcttcgcgactccccggatccgcctc

SEQ ID NO: 8 - DNA, 12 bp, Homo sapiens
ggggactttccc

SEQ ID NO: 9 - DNA, 73 bp, Artificial Sequence
  Primer_Bind: Synthetic primer with 4 tandem copies of the NF-KB binding site (GGGGACTTTCCC), 18 nucleotides complementary to the 5' end of the SV40 early promoter sequence, and a XhoI restriction site.
gcggcctcgaggggactttcccggggactttccggggactttccgggactttccatcctgccatctcaattag

SEQ ID NO: 10 - DNA, 256 bp, Artificial Sequence
  Protein_Bind: Synthetic promoter for use in biological assays; includes NF-KB binding sites.
ctcgaggggactttcccggggactttccggggactttccgggactttccatctgccatctcaattagtcagcaaccatagtcccgcccctaactccgcccatcccgcccctaactccgcccagttccgcccattctccgccccatggctgactaattttttttatttatgcagaggccgaggccgcctcggcctctgagctattccagaagtagtgaggaggcttttttggaggcctaggcttttgcaaaaagctt

SEQ ID NO: 11 - DNA, 283 bp, Homo sapiens
  SITE (23): n equals a,t,g, or c
  SITE (66): n equals a,t,g, or c
agaaaactctatagggtgttgtnttcatgagtggtagaaggtcaaaactatgtgtaagtcattttnaatctcaacatttgatcttaaaaggagaagcaagaggaagagttgctcactacgttacccccaccaacaccctcccagataaatgcagttggcattgccattgacaaagtggtacaggaatttggcttacacaatgaggaacttggaacagaggctagaaattaaacgtatcatgggaaaatgtgttccaacacaagttaccaggtatttttctagg

SEQ ID NO: 12 - DNA, 331 bp, Homo sapiens
attttttcatcttcccgtttccttcctcttctccaggacttccatcttggaggagcaggaatatggtttatcatttgagagtgatataagtcagcaaatacagaatatctgttcttctggtgctgtattccgggagaaagccatagacccttcctcttagggagctgagataggatagtagggaggcaggaaggtagaaatacacatgtattctgagtgccagggtggacgcctgcatgtgagattgttgatacaacaagararggagtgggagttctcctgggcgggtcttgagctgagatttgaaagargagtgggtgttttgttgtat

SEQ ID NO: 13 - DNA, 257 bp, Homo sapiens
  SITE (228): n equals a,t,g, or c
gaaccactgtgctccagcttgggcaatacagcgagacctcatctcttaaaaggattaaaaaaaaggataaagactgtagcattttctcatagagtattctaagctttataaagttatttccccaacgctttggacataatgattaggtcatttgaagttctgagaaacagaatgattatggaagttacttaaaactacttcttaaagtataagaatattgctaggcgntggtggtaatccccactatttgggaggct

SEQ ID NO: 14 - DNA, 668 bp, Homo sapiens
  SITE (665): n equals a,t,g, or c
tttttattttttttttttttccatatttagccattttactacatcagggtacaaaaatgatcatgggagaaggcactgccttaatcaactttgcaaagtgtaaagtgaaaccgcacaatgctcattaccgcccaacccagagcctggctgtggggataatgaggctggcacggatgttaacatacggtgtccttggaaaaagctaggaatgcgtcagtatcgaagagctgcaatgtccaagaatcataagtaataatttgagaatcccaaagatgtttgtttacattggctattattgtaaaatagtcaaagtataacatcatgaaccaaaatagtgtcaaaacaaaatctgttccactgtggcacgtatgtgacagaaacacatgcacacaaagtacatcaaaaggctcgaactgtgggaggactcggatagtaaatcacttccagacttaatatcagaagagatacggtgcatccaacgctgtcagggacagagtcgcaggcagcattgcctgrcctggggaargccctccgcaaacttctggctggacaggaaacagtttacctccttcctmcaaactgagggggctgaatttcaggaaggtgagctccacctcagtgccamccactctgcctccctggagaggcgtcatggggcgcatagntgt

SEQ ID NO: 15 - DNA, 318 bp, Homo sapiens
  SITE (203): n equals a,t,g, or c
  SITE (249): n equals a,t,g, or c
  SITE (271): n equals a,t,g, or c
tacaaattaagatgtgcccatggcttagcctgcgctccatcctgggccctgcagcccactcccagggtaaccctctgcagacccaagactaatgggacaagggatctgctggggcagtgtaggccaaagctgcggctgggtccaccagaggccaagatggagactgacctggacatgcttcctgggcagctttggtggcagtntcccttctctatgcctcacttttctggcagaattttcaggcatttnccaagcggaagggagggagagnactcaggcatcactttgaatgttctgccagtgaccagctttaaacaa

SEQ ID NO: 16 - DNA, 335 bp, Homo sapiens
aattcggcacaggaaaatgggctcagagaaacccatggttatgtggctaggaagtgacagagaattagtacccagcccaacttgaaaaccctagtgctagaccttgtatttttaaaagtttgtgtctttttagcaagttttacaagtctgatattcagttcagaaaaagaaccactactttatgcgcctataacttcagtctggcaggctttgaattctttagccaatggaccatgcagtggtggccaaatgtcaaaagcatgaaaagtaagaaaactatgtttggctttgaaatgctttttggtacttataattgaattgggaatgttctcccc

SEQ ID NO: 17 - DNA, 432 bp, Homo sapiens
  SITE (346): n equals a,t,g, or c
  SITE (354): n equals a,t,g, or c
  SITE (389): n equals a,t,g, or c
  SITE (408): n equals a,t,g, or c
aagaattgagtggagacctgctatgatacgcakagaaaaatgagaaaactttagcaggaggagatagagagatagacgcacaatagaggtagaaggctacatagaaggtaaagtgaagattgttttggctttggaagacagaaaagttggactataacatgaataaagagaatttggaaactgacccataacattatttgggaaaactaacctggagtttaatattaatgtaacattaattgttgttaaatatcttagttgctgcctttcttaaaataaatttgatttttcagtataccagcacccttctatacaatacataaggaaatcagatttttaataattntacatccntaggtaagcttaattagggctcagttctcatcttnggggaccagttctctgagnttgaggactgatgagttccggggg

SEQ ID NO: 18 - DNA, 262 bp, Homo sapiens
  SITE (190): n equals a,t,g, or c
  SITE (243): n equals a,t,g, or c
ggcagagacagatcttcaactgttgtatttgccaataaattacctgaargacaaagcatttgaacatccaggagctgccatatcatgactgggtgtcatggcaaccactgccatttcttttctgtcctaaggtcagatcaaagcaagccgagccctcctgctctgaatctatcgtggacagttgtgttanaatatggtgaaccagtgactctgaaatagtgattatttcctagatgtggtatngtgaaatatattcctgaat

SEQ ID NO: 19 - DNA, 320 bp, Homo sapiens
  SITE (311): n equals a,t,g, or c
  SITE (318): n equals a,t,g, or c
  SITE (320): n equals a,t,g, or c
ggggaaggttgagctccttccacccttctccagctcaggatcagaaccctggaggcacctgccaccgagtcagggcagtgcctcaccaagtcaccttttcccctggatgactgtcacagcttcatacctggtctccctgcctctggccctgccctgctatggcccatccgctacacaagagagaagaaactaatctcctatagcaccactttcatcttgttctccgtcctgctcaaaaaccttcagtggctccccagtgccttcaagaataaagttgtgttctccttgacctaataaaaaaaaaaaaaaanaaaaaantn

SEQ ID NO: 20 - DNA, 313 bp, Homo sapiens
  SITE (283): n equals a,t,g, or c
  SITE (290): n equals a,t,g, or c
  SITE (312): n equals a,t,g, or c
gcccacaaggaactgaattcctctccccctcccaaaatgcaagccttcttttcctgaattacaraatttttgtttcttccattatcctaatattacccaaacttcttttctatcagtatctctatattaataggtgtctttattttttattttatttttattttttctttttagagacaggcagggttctcactttgtcacccaggttgggaatgcagttatgcaatcatagttcactgttaaccttgaactcctgggctcaaagccatcctcccatcccagntactccnggaggcttgaaaagggaaaagng

SEQ ID NO: 21 - DNA, 272 bp, Homo sapiens
  SITE (244): n equals a,t,g, or c
gaccgagcgggggtagctgctgccctcgctgcagaggtatggccgcctgtagccctaccccttgcttcagccccttggccctgtgtccctctgtccaccccacctccctcccctcagccagctcttctcccacctccctgccccaacaactggcccttgcatacacccttgccaccttcagcttctcctacctctccctgtccgggactgcccagaccatccctcttccaggtgctggttaaanttccctcaaagctgcctgttcttgggct

SEQ ID NO: 22 - DNA, 517 bp, Homo sapiens
  SITE (321): n equals a,t,g, or c
  SITE (425): n equals a,t,g, or c
  SITE (428): n equals a,t,g, or c
  SITE (441): n equals a,t,g, or c
  SITE (481): n equals a,t,g, or c
tagcttttaagaaatagatgctgttttccgaggtgatggaaagggatttataacttcttccagaattctttgtggtattgctcagtaaatgcctgtscttccagaagttcagaacacgtcatagtgacaactgcactcagctataatgtatttggaaagggaactaaactttcagctatatattaatcccctgagggaagagccacctagacacgtttttggcttatgtcaaatagtcaagctaccatacttttaaaaataagggcatagtctttaagcgtttgcttcaaagatagaaacctgtctcataacctggattanttcttaaagtgcttgcaaagaatctgccagaaatactaattcattacccctcctcctaacaacctcaatcctgttttctcaaatatccttaacttcccccgacnttntttctacacacantttcttgtttttggatttaaatacttgttgaactttggcnctcctttacctgtttaaacttttttttttttgggga

SEQ ID NO: 23 - DNA, 265 bp, Homo sapiens
  SITE (99): n equals a,t,g, or c
  SITE (257): n equals a,t,g, or c
gagaccagaactaggctctccttggtaccagcagagagccaagggactgcagcacaggagggaaggaagcccctggaggccagttagggcagccactancagtgccttcatgagaaaagtaccctccagattcaatgcagccctggggacacttgtcctggcaagaaaagagtgtcctcgtgcaaattatcaacaagtagtctttcctgcctgcaaacacactccctccccagggacagccacaaacagccttgttnaaggagca

SEQ ID NO: 24 - DNA, 452 bp, Homo sapiens
  SITE (442): n equals a,t,g, or c
gtgagaagacagcaagaaaaacaatgataacacccaaaaataatccttggcttattaaaatattggcataataaaatggggacagggaaattttcataaaataaagagaaatatcraggaaataaagagcatgctagaaagcaaggttttaatttattcttttaatttattattttccagctttattgaggtgtaattgacaaataattgtatctattcaaggtgtacaacttgatgatttgatatatgtgtactgtgtaatgattaccacaatcaatcaacatatccatcacctcagatagttacccttttgtgtgtgtgtggtgaggacacttaagatctgctctctcagctactccggargctacggtgggaggatctcttgaraccgggrgattkargctgcagtkaccatggttgcaccactgcactccggcctgantgacaaacaa

SEQ ID NO: 25 - DNA, 312 bp, Homo sapiens
  SITE (246): n equals a,t,g, or c
  SITE (286): n equals a,t,g, or c
  SITE (310): n equals a,t,g, or c
gacaaattctaacccattttatcccgacaatgtctgctttggatgcggctggcatgatgaccctgtggagcatcctcatgtcatgcccagtgaacagaggcatgttgtggtctggaggtcaggaatgatgtctgggctgaccatgggtatttgagaatcatccaactccagtgggtattttaggttgggtctgtgtgcatgttgactcctatgtgtatgtgaagtcctggtcttataatgaatganttggaacacatctactcatggctccaatacccaactcaanttttcccctccgctgttgaaaaanga

SEQ ID NO: 26 - DNA, 403 bp, Homo sapiens
  SITE (394): n equals a,t,g, or c
aactagtggatcccccgggctgcaggaattcggcacgagctggacctgtctttccctactctagcccttgtgatgggcacaggcaactgggacacacagcacctgccgtggagcagttcagggtgttgtgaggaatctgaatggaaagtaatgaaacaagtgtctttgcctcctctgtagttatgtgcggtcttacactattttacatggtcactatcagcttagttgtttgtcacttgttggtgactgctgtaaggtagatttgagatgtccagggactgcagagctgcctgggatatgactggcattgacacacttgcttgatctcacagcagttgccatggcaggtcaggttgcatccccatccatcccagtgacgaaaagcatggggggnccccttttt

SEQ ID NO: 27 - DNA, 273 bp, Homo sapiens
  SITE (251): n equals a,t,g, or c
gaagtcttggctttgctctgagcccaactgcaataatataataatactgtcatggcttgtattagaatcctaagttcaccctcttctaagctgaaagtagccatatcaaaattagcctgtagtgttagaagatcaggcaggaagtacacaactactattcactttttccattgacagacataaagttgaatttatatattttttgttgtatcaaaaaagtgcccttgcctctggcatcactggggcatggngtctttctttaaggcatttagg

SEQ ID NO: 28 - DNA, 259 bp, Homo sapiens
  SITE (254): n equals a,t,g, or c
  SITE (258): n equals a,t,g, or c
gaaaataagcttgtaagaataaaaattaatgattttgataaatcagctgaaatccttcatttgccttaagtggtggtggtcgcaagtaaaggtgagtatagtcaccttagaattaaaatctttataaatgttcccaggaagcttaatgcagtattggtaatacaaaggtaactggacttttggcaatgtggtttgattgaaccctgaaatcctggatttaaattctttttttttttttaaaacaaacccaaacnccgnc

SEQ ID NO: 29 - DNA, 401 bp, Homo sapiens
  SITE (299): n equals a,t,g, or c
  SITE (318): n equals a,t,g, or c
  SITE (338): n equals a,t,g, or c
  SITE (394): n equals a,t,g, or c
gaaaatatgtagcaagagcaattcaatctatgtgccaaaagaaatttctttttgcaaagctttcaggtctatgggcacatgctgtataacttatattttataatacattttgtaatgtgattttttttgctaaagtgtttccctttttcatagtctctggcacatatatctatggaatacgctgtcagttcttcaaagtactggtattgttgcatycaaaatggtaatcyawaattattttctttttatcaatttgttaattcctgaaaaaaataaagttacaactatatttccctganggtaaattccagaaggttnaaacttaaaaacccggaacnctgaaaaaaggttttactaatggcttgttccaagccatggtccccgaaccagggtnccaagcc

SEQ ID NO: 30 - DNA, 283 bp, Homo sapiens
  SITE (279): n equals a,t,g, or c
gtcatcctatattggcattttcttgacaaagtttaccatgccatactttaaaagtttacctttaggtaatagccatttgtctttaactgtagccagtagttacctccagtcaaataatgttccttctgtattagtcaactccattttattattcagaaagtttatttttaaagtactgtgtatatatgggcaaatatataaataatgtatattgtgggctctccaggatctaaaatagcgtcaataaagaaaaaacatcctagaataacagagaagtanaaaa

SEQ ID NO: 31 - DNA, 338 bp, Homo sapiens
ggtggttattaagaggggtaagggggaacacttaaaaaatcatagcgagggacagaatgcccccagggaaccgktggcgatgtttggagacatatttagttgcaacaacttgtaaggagggtgctattggcatggagaggccagggatgctgctaaacttcgccttacagcaaagaattatctagccccaagtgccagtagtagtacctgtkttgagaaacccccctrgatggagatgcagaagaccagacctgggcatggaatgttcttatgctttatgtttacataaatgtgctgtgggstatatcgatttaggctgtaattgcattaaccttcca

SEQ ID NO: 32 - DNA, 346 bp, Homo sapiens
  SITE (273): n equals a,t,g, or c
  SITE (285): n equals a,t,g, or c
  SITE (344): n equals a,t,g, or c
gttgaattctacctcatagttaggagtgctaaaggagtgatagcaggaagtgatcaagtagsatcttctgttcctcttcagtgtgtcttgcacatacagtatttctccatgtcaaaaagtggtttttggtgttggttttgttttgctttttgagacagggtcttggtctgtcacgcaggctggagtgtatttgtgtgatcacggctcactccagcttcagtctcccagctgctcgggaggctgaggcaggagaatggtgttgaccctgggaantgggactggcantgagccgagaccgcaccactgcacttcagcctgggtgacagaacgagactccatctcanaa

SEQ ID NO: 33 - DNA, 300 bp, Homo sapiens
  SITE (237): n equals a,t,g, or c
  SITE (275): n equals a,t,g, or c
  SITE (286): n equals a,t,g, or c
ctcagccctaaacaacaagtaatctgtgttctgtttctatatgtttggctattctggacatttctaataagtgaagtcacataatatgtgatctttgtgactatttctatatatatatatattttttttgagacagagttttgctcttgtcgctcaggctggattgcaatggcacgatctcagttcactgcaacatccgcccccgcaggaagaattgcttcaacacaagaagcggangtttgcagtcagccgaagttcatgccattacactctancctgggcaatnaaaattgaaactcc

SEQ ID NO: 34 - DNA, 393 bp, Homo sapiens
  SITE (392): n equals a,t,g, or c
cgggggtatcggacgtgtgatgcaaagcaggtcacaatccagcgatcttggtataatagggggacattttttttcacttaagtgcaagccaaatgggtcaagtaatcgcaagctcgtgccctaacactaattgacttatttggggattattataactgtaatatttttcttaatgtcactgttttctgggctgttgattttagcgattgccaagcaatggcattaaatctcttgtaaattttaaattgcacgttatttctgtaaacaagtccctctcttcacatcctggtcattaacctttgccgatttatatcaccaccctctttttttctttctttcacaattactcctgtcttgccgctgaaacgccctgctctcagccaggaaggggna

SEQ ID NO: 35 - DNA, 431 bp, Homo sapiens
  SITE (323): n equals a,t,g, or c
  SITE (375): n equals a,t,g, or c
  SITE (387): n equals a,t,g, or c
  SITE (406): n equals a,t,g, or c
tcattaaaaatcacgatccagctaacatttactaacaccaaaaatgttcacactatatgaagttcatgttcacattgtacaatattcatactacgtatgtagagaaaaactagaaagctatcacctaaatgttcataagataataatcaattaagccaatttaaatattatggatattttaataaaataaaaaatacttaagcggttaaaatggaatataaactgttaaactatatacaaataaatgcaaagaatgatggttaaacaaattcacagtccctagctacgcacaaatccaagcattgatcctgagcacctggganctccagttggccaatagaaaaaaccaaagggaaccagttatcagttgacggngaagggggaaantccaaaaccagggaggggntgaaatattaacatagaaaataaga

SEQ ID NO: 36 - DNA, 411 bp, Homo sapiens
tacagaagctgccatttaccagccctctgtgattttraatccacgagcactgcagccctccacagcgtactacccagcaggcactcagctcttcatgaactacacagcgtactatcccagccccccaggttcgcctaatagtcttggctacttccctacagctgctaatcttagcggtgtccctccacagcctggcacggtggtcagaatgcagggcctggcctacaatactggagttaaggaaattcttaacttcttccaaggttaccagtgtttgaaagatgtatggtgatcttgaaacctccagacacaagaaaacttctagcaaatttcaggggaagtttgtctacactgcagggctggcagtattttcagcaaacttggattggggacaaacggggcctgtgcctt

SEQ ID NO: 37 - DNA, 267 bp, Homo sapiens
  SITE (236): n equals a,t,g, or c
  SITE (267): n equals a,t,g, or c
agacaggtttttagagttgtcatggtgtatgtacaatatmacagaaatagttgaggttattcagtggagttgtaatgttttacaaatggaaagctaaggacatagtcttggaatcctaaacatttatagggcttttgggcaagagttattcactaaagatgagggggagaagttcttgccacacacatrtacaattgaatatgtycatggacattttaatgttaaataagtacatncattttgtgaactacttgtcttattaaattn

SEQ ID NO: 38 - DNA, 371 bp, Homo sapiens
  SITE (347): n equals a,t,g, or c
  SITE (348): n equals a,t,g, or c
  SITE (359): n equals a,t,g, or c
aggacatagttaagatatggcaaggcaaggatttgaaacctggtgtgcttagttgccaaagtctcactcttttctgttgtacctcccgattaatttaggtttgacttccttcttcagcatcttgggcaatgtagtaatagaattgatgaaaaatagtagtaacaattattgcccacctcagcctttgaccccttctgagctctcttaatcaacctcagtgctgagacccctcccctccattcaccactccagccctctcccattctgatgccatcatctccctgcttcttatccagcctcacgttaaccagaatgtgggagcttttttgtggagtttgattttctgnnttcctctgggntgccgatggggg

SEQ ID NO: 39 - DNA, 264 bp, Homo sapiens
  SITE (60): n equals a,t,g, or c
  SITE (245): n equals a,t,g, or c
ggctcatgtcctgagctgctgggctgagaccagactctccgagccctggctggcccagancccatttgtgggagcagctccttccttggccagcacgattggcccacttgtcaagagccgacttacatgaaacccttcttttctgtggattcatcatctatgacacacactcactgatgcataaactgtcacctgaagagtacgtattagctgccatcagcctcttacttgggatatcatcaatntgatttcctggcacctgtt

SEQ ID NO: 40 - DNA, 353 bp, Homo sapiens
  SITE (48): n equals a,t,g, or c
  SITE (212): n equals a,t,g, or c
  SITE (353): n equals a,t,g, or c
gaattcggcagagtgctctctgtctctttttctctgtgtctctatctntgtatgtgtctgtttctcccttccccatcctctcttataatctgtttgttgaggacactgagccatttgctgtgttttgtttcttccatagtctgaatttggttatattcccaaagtgttcttttatccctttatttcctgtaaattgatgtttagatttaaangacttaatcagattcagtcttgatttttcttgatgtggggtggagacaaaagtacttcacagttggtcttaacgtacttacattaaggaagcatgtgatgtcttggttttcttcatgtaatatccagcaaccattggaagn

SEQ ID NO: 41 - DNA, 305 bp, Homo sapiens
  SITE (300): n equals a,t,g, or c
  SITE (301): n equals a,t,g, or c
tcaggtattccctgctcttactccaaaaagatggacccaggtccgaaggggcactgccactgtggggggcatggccatcctccaggtcactgcgggccwccccctggccatggcccaggtcacccaccccctggtccacatcactgaggaagtagaagaaaacaggacacaagatggcaagcctgagagaattgcccagctgacctggaatgaggcctaaaccacaatcttctcttcctaataaacagcctcctagaggccacattctattctttaaaaaaaataatttattaattttanntttt

SEQ ID NO: 42 - DNA, 302 bp, Homo sapiens
  SITE (268): n equals a,t,g, or c
  SITE (295): n equals a,t,g, or c
  SITE (302): n equals a,t,g, or c
gcttatttgcagttaaaaactctgagggcatgagacatataaacttttcatggggagaaaatcactgggtgatttctgggaggccaatacatgtatggcatctggggacagtatcaggaatcttaggctgagaagtaagaaaactttktgttttttmctttttgactgakatgggatcaaggatgtgagggaaagggaaaaagatgtgttaaaggcagctctgtctagggcctgtccatagattgaaacattatttctttttcttttnttttcttttcttttttttttgaaacanagtttcn

SEQ ID NO: 43 - DNA, 436 bp, Homo sapiens
  SITE (401): n equals a,t,g, or c
  SITE (408): n equals a,t,g, or c
  SITE (423): n equals a,t,g, or c
  SITE (436): n equals a,t,g, or c
gattacaggcgtgagccatcatgcccggcctattattattattattattattattattattaaagctagtgctattagagacttgctaggcaggctgtatggaaaatgattaaaaagaaaggtctagctgatccctgggctgtatgacttaaattctcagccactttcagttcctgttatattgccttgtggttcacccagcctcctgactttgccttcccaccaaatcttttgctggtgtccttagaccagtggagttgaggaaattcccaagttcgcagatcttcacacaggagtggatccagtatctacctagccagactccaacatactctgggctgggatggctgccgctgatatgttatacatcaagaattttttaattctcttatggttttaangctgggnaatatgaattagtcnatgtatattggtn

SEQ ID NO: 44 - DNA, 529 bp, Homo sapiens
  SITE (524): n equals a,t,g, or c
tcgctgagagttggtagatttttttatgaactgtatccctctagttccaaagtgcccaaaccaaattgactgtatcttaaaaaactactgcataagtaaaattaaaaagcagattgcttctcctgatcttttttgtatttcaaatggaacaaaacttttcttgtaactgtaatttgtaaagtttagatatcagtttacagatgggggaggggagaaggaaggaaatatgggtgaataatatgtgtatgtacatacatatgtgagtctgaggcccaaggatagaatactgtctccaaccttagccagctgtggccatatacttgtagggaagtttccatgcttcttcagctgcttttctgaattaccaaatcactcctgacaacacatattctgccacatgaagacgaactagaatcaatctgataaatctgagatttatcaatcaaatacatcataatttgccaatcatagtaaaatgaaaatagttttgcctaaaaaaaaaaaaaaaaaggggcggccgtttnaaagg

SEQ ID NO: 45 - DNA, 548 bp, Homo sapiens
  SITE (402): n equals a,t,g, or c
  SITE (467): n equals a,t,g, or c
  SITE (469): n equals a,t,g, or c
  SITE (531): n equals a,t,g, or c
gcaagagcagaacccggcattgagtattttgaagatggagccaatgtccctggtctgcccctgcctcggcatcccccaccacctctggcatccatacccgcggtgggtgctgtaacggcatctgggctttgtcatctcctttgcagaacatcgtagctgtgggagctgggttctgcgacggcctccgctgtggagacaacaccaaagcggccgtcatccgcctgggactcatggaaatgattgcttttgccaggatcttctgcaaaggccaagtgtctacagccaccttcctagagagctgcggggtggccgacctgatcaccacctgttacggagggcggaaccgcagggtggccgargccttcgccagaactgggaaggtagcccctcactgctctccgnaccccctcttcctcacttgagactcctgcttggggtgaactgsarcccakggagatttatgccancnttattgctgggatggtccgttgcctgctgtttttacttgactctttggtcttatctttgggntttaacttcttggttca

SEQ ID NO: 46 - DNA, 445 bp, Homo sapiens
  SITE (320): n equals a,t,g, or c
  SITE (378): n equals a,t,g, or c
ctcatctgtagtgaattaaataacatctcccaaaaattcacctccaccaaagcctcagaatgtgacctgatttggaaatgccatctttgcagacatgattaaggtaaggattggaataagataatcctgcattagggtgggccccagatccaatgagactgtccttaaagtcctccacagcctaactccaggctacctcgccagtgtggattgtctacactgactgcctgctcctggaaaactgatcttcctaccaaccaaacagctggcttcagcttctcgccatgcaagttcctgccacatgccacttctctacctangaaattctccctcctttcacctgaacctgtccaaatgtttactcttccttcaaaatanggctccaatctcaaaatttctgctcccatggggtcttccctgatccctgctgccgggcacatctcag

SEQ ID NO: 47 - DNA, 152 bp, Homo sapiens
  SITE (152): n equals a,t,g, or c
ggctcactataacacacattgcaagggagccgctcatagtgcacacatcctttggctgttagaagcagactcacataggctatttctggtgtgtcgtggctttcttctttcttttttttttttggtggggargagtgtggggraggaaaaan

SEQ ID NO: 48 - DNA, 556 bp, Homo sapiens
  SITE (478): n equals a,t,g, or c
  SITE (483): n equals a,t,g, or c
  SITE (512): n equals a,t,g, or c
gcattcataaaaacagatgcttcctgagtgcctactttttgccaggcattattgctaggcaaggagaatcagccttgaataaaacaaatcccaaacatgttctcatggaaattagaatctattgggaaagacagacattgagtaagtaattacaagcatgaggagtgttacaaaatggtgctgtaggagaatacaagggacctggccaagatgagggtcaggaaagaccttctgagggaaataatgttaaagccgaaactgatgtctacacaagtcaaaaagttgtatatacacaagtcaaaaagttgggaaaagaatgttccaggtagagggaactgcatattcaaagatgtggaggtaggatggagcatattccatttgaagaaatggaatatgtatgcaatatatatttatttcatctggagaaaggaaagcaaaggggaaggtgggtatgtaacgaggctwgaaagacacgcanggcantgctgtggaaagattggaataattatttnatctacaattatttgtaagtccttctatttccaagcctgttcat

SEQ ID NO: 49 - DNA, 330 bp, Homo sapiens
  SITE (328): n equals a,t,g, or c
gtgtgaattagtgatgggacactttttctgagttccaatttaggaattccatgaagcatttttaaatcagaatgtttgccccagtaattcaatgtttacataattatgtttttaataacgttattagcatcaaccttaatgtgtaacagaggggatggttgagttatattgtatccttatatatgttgtgcagccattagcaagtcatattttcaacaaaggttgaattatgcagactaccaaatagtatgkagtaatttcatcattttgtgtaaattatacatagaagaargactggtgkgatatatmcaaaggtggtaacagtggntt

SEQ ID NO: 50 - DNA, 410 bp, Homo sapiens
  SITE (353): n equals a,t,g, or c
  SITE (375): n equals a,t,g, or c
  SITE (379): n equals a,t,g, or c
  SITE (408): n equals a,t,g, or c
ggaaaagcaatttaaacatgtttttaaaaatgtttccatgcaacctaagtttttggccatgaaacagcaccttccttgtacttctccagctgttgtcctttcaaagcaggggatgctattcttcttgaacctgaaaaacagaatgtcagtgtgttctgtgaatttcctgtgattttcaccagtggaacacatgtccagaaccaagctgagtcccttccagagcacatttttctaggtgctggagagagaaaataggacaagtttccaaatgctaaggggatataaaggagaagataaatgcagcatggggaccagccatagaactgtcatgggagtgggaccacacttgactnctttccagtagcagaatctttnccanaggacttttcctaagaaaatgatatttgngg

SEQ ID NO: 51 - DNA, 373 bp, Homo sapiens
  SITE (308): n equals a,t,g, or c
  SITE (317): n equals a,t,g, or c
  SITE (366): n equals a,t,g, or c
cacgcgtccgcgcactctgcgggtgcggagcgagcttttcggtgtgcactgtgacaaccacaaacacacttttgaacgtagtggggcttggctgctgcgagttacgcaggtatcctggagaggcagggcacccggggacacggatgactcgaggccgacttcgggtggctctctctgctccttcctgtgggggtgaagacgcccgggtcctcgccggcccgtgcgcaggggagcgggaccgaggagcgctctcgctccgtcctgcggcgtcccgcgcccaggtgcacatcggggagctggggacgcangcgactcangcaagtttctgggaagtcgttcttacgtcatcatgtcacggcagaacanggcaaaa

SEQ ID NO: 52 - DNA, 1772 bp, Homo sapiens
  SITE (1735): n equals a,t,g, or c
  SITE (1751): n equals a,t,g, or c
  SITE (1766): n equals a,t,g, or c
gcggacgcgtgggcgggactctattgtggcgattggttgtttcattatggatggaggggatgatggtaaccttattatcaaaaagaggtttgtgtctgaggcagaactagatgaacggcgcaaaaggaggcaagaagaatgggagaaagttcgaaaacctgaagatccagaagaatgtccagaggaggtttatgaccctcgatctctatatgaaaggctacaggaacagaaggacaggaagcagcaggagtacgaggaacagttcaaattcaaaaacatggtaagaggcttagatgaagatgagaccaacttccttgatgaggtttctcgacagcaggaactaatagaaaagcaacgaagagaagaagaactgaaagaactgaaggaatacagaaataacctcaagaaggttggaatttctcaagagaacaagaaggaagtggaaaagaaactgactgtgaagcctatagaaaccaagaacaagttctcccaggcgaagctgttggcaggagctgtgaagcataagagctcagagagtggcaacagtgtgaaaagactgaaaccggaccctgagccagatgacaagaatcaagagccctcatcctgcaagtctctcggaaacacctccctgagtggcccctccatccactgcccctctgctgcagtatgtatcggcatcctcccaggcctgggtgcctactctgggagcagcgactccgagtccagctcagacagcgaaggcaccatcaatgccaccggaaagattgtctcctccatcttccgaaccaacaccttcctcgaggccccctagtttctccgtccctacacagggagctcctccccaagggtagatcggaccgttcatgctgcctataggcattatgtccctcaaaaaaaaactcctttgcctgcatcctgtgtacaacatgacatttttaaccaatccaatctaaaaatgtgccagaatccacctgtggcccgaatcgtgtttggttcctctttctactccactgcagatgaccaaacctgtcccgctgccactttcctcactgatattgggaggagggcaaggcccagccgaagttccactaaaaatgccccaggagaataggcaccggctggcttgccaaagggtttgggttttattgctttctgttttttcttttcccgacagcacaaagaagtaagggcagttattggacaggtgttatttaaacattctattgtaaatgaatgtgttgtttggttctactgcattgtggagcatgcgggggaagagaactgacccaggtaatgaaatggagcccttccctggaactaaccagtccttgatgttgtgtgactaagtaaagatgataaaccccatctgctgggggtgtcacttcacactcggcatgcattgtgaaagctttccatacccttggccattccctctctcctctctctccaaccccatttatgcaggaagggactgctaacaagaacgcttccatctcaaaccttttctctgcctgggaaattattttatgtttgtttttgaaataaaggatttagtttaagattctaaattttagagaaacaaacgtaggccttgtttactaatagccagacatcagaactgcaggtagggtatgttaatgaggatgactttatttctgggcagctcctgggratcctaatattgttaaatggaggtgggggccacactttgccattatttgttggaccctttctnatttgagggccccttncttcttggttttaantgccat

SEQ ID NO: 53 - DNA, 437 bp, Homo sapiens
  SITE (397): n equals a,t,g, or c
gacaacctggagaaggtctgacagccccacagaaagccttgaaagagggaaggttttgggtcccggcttcctgatccttctgggcactcctgatgtctaagtagctagaagtggtcccaggagaaagggagcctgggagactcattagagcagaaggtcgagagagacatggcctaagagtgaagtgtacagaggtatgcagtaaatgctatttcccttcctgcccttcctgcccctggtactctgggacttggcacttctttctggagtggggcttatcattttcaactttaagagcacctgagggttcttaattctgagacacactgaggcaagccatgatgccaaccgggagtgttgggcactgagaacaacgcccatttgggagagagtgganraaatgtktgctctgtggctgatgcttggagcccttctct

SEQ ID NO: 54 - DNA, 404 bp, Homo sapiens
  SITE (335): n equals a,t,g, or c
  SITE (367): n equals a,t,g, or c
  SITE (378): n equals a,t,g, or c
  SITE (392): n equals a,t,g, or c
gaaaaaaaaaaaaggaagaagggaaggcaggctggggaggttggggaaaggaagcagggagtgcagatcactccccttccatgagttgttttcttaagatgctagaacttggccaggcatggtggctcacccctgtaatcccagcactttgggaggctgaggctggcagatcacttgaggtcaggagttccagaccagcctggccaacatggtgaaaccccatctctactaataatacaaaatttagctgggtgtggtggtgtgcacctgtggtcctagctacttgggaggctgagacaggagaatcacttgaaccctggaggcacaggttgcanagagctgagatcgtgccactgcactccagccnaggtgacagantgagactccgtctnaaaaccaaaaca

SEQ ID NO: 55 - DNA, 489 bp, Homo sapiens
  SITE (388): n equals a,t,g, or c
  SITE (394): n equals a,t,g, or c
  SITE (467): n equals a,t,g, or c
  SITE (473): n equals a,t,g, or c
gtcgacccacgcgtccgcctaatgccaaaaccaacccacaaaataaaccttggttaaagtagcctgttcattttgctttaactatgtatattgcaccagattctgccaggggctcagcgtataaagatgagacccctgccctgccagacaggtgggatgatggccataccttgagttagtcaaggcaccatctggctgtgtaacaaaagctaaaacatcagaggctgagcagcactcggacccacgtcccagtccaagtgtcagtcgttatgggggcccaggacagcccggacctagttcattcctttggtgcatcctcgacacacagcttccatctcttgagctgagatggttccagctcctgccgtcatgtctgcactccagccanagggangggaagaagggagaggggaaaggcaagtgtccctctttatttttaaaggcatgacctgaaagttaaacacttnaagttncttccacttggcaaaa

SEQ ID NO: 56 - DNA, 451 bp, Homo sapiens
  SITE (1): n equals a,t,g, or c
ngtttcaagtcagtagctaatcatgagaggctggtagttggtacaaaataagaattttatttcataattaaagcaaagagctaggaccagtaatcagtcccttgggtatttactcagccctcacctgccatattctcccctcttttcttttgatgaaagtcaaaagaatactttaaaatacattgcctatttttactcctccaagcagccttggtaccctaacagaaggcccagttatttaattttctttttgtcataaagtaggaaagttatacaaatccgcttaatactatacaaaacacctctatttttaaagtcaagtaccttttctacccaggacargttctcatctttggcttaaaatgccggtgttggggaagtaaattaggaagtaaaaaccttatgtcactgggcacaagtgggttacgcctgtaatcttaacactttggga

SEQ ID NO: 57 - DNA, 224 bp, Homo sapiens
  SITE (208): n equals a,t,g, or c
ggacaagtatttgaatagacatttcttcaaagatgtggccaataagcacgtgaagagtttataacatgagaagacgctcaacgtcatcaatcattagggaaattcaaaccaaaactacagtgggacagcacctcatacccattgggatggcagttatttaaaaaaaggttgacctgggcgtggtggtgggtgctgtatccagctctangaggtaggagattgtt

SEQ ID NO: 58 - DNA, 334 bp, Homo sapiens
  SITE (281): n equals a,t,g, or c
  SITE (282): n equals a,t,g, or c
  SITE (301): n equals a,t,g, or c
gaactaattcaaaattctaatttaatcaaacagttcttgtttacatagaaaaattcaagaatgctgaaaacaaaaggagaaagcarcactcattaccctacctcttcatggtaaccactgttaaccctattatgctcatattttgatctttagctacagatttttttttgaaaaataggagtgttattggtttgagacttccttttttacttcagtatttaaaattatccattcacacctataaatattaatctgtatcataattttaaagggattaaagnnatttttccagtcacgattngaatctcaattttcctggtttttacaccccgta

SEQ ID NO: 59 - DNA, 594 bp, Homo sapiens
  SITE (492): n equals a,t,g, or c
  SITE (510): n equals a,t,g, or c
  SITE (531): n equals a,t,g, or c
  SITE (582): n equals a,t,g, or c
  SITE (591): n equals a,t,g, or c
gagcataactcagggtgaaagtatatcagaacaagggtcaactgacaatgaatcctgcactaattcagaactaaattctcctctggtaaggaggactttaccggttttgcttctttatagcatcaaggaatctgatgagaaagcaggaaagatcttttcacagatgaacaatattatgagtaaaagtttgcatgatgatggttttactgttccacagattattgaaatggagctggatagtcaggagcagttgttgttgcaggatcctcctgtgacttacattcagcaatttgcagatgcagcagccaaccttacctctccggattctgagaagtggaactctgtgtttcccaagcctgggactttggttcagtgcttgaggctgccaaagtttgcagaggaggagaatctttgtatagactcaataactccttgtgctgacggaattcatttgttggtaggactgcggacatgccctgttgaatccttgantgcaataaaatcaagtanaggccttgaataatttaaatnaaattaaacttttgcctatgaatagacggaaaggtgaccttggaatcaaantcttgctgnaat

SEQ ID NO: 60 - DNA, 585 bp, Homo sapiens
  SITE (449): n equals a,t,g, or c
  SITE (549): n equals a,t,g, or c
  SITE (565): n equals a,t,g, or c
  SITE (570): n equals a,t,g, or c
  SITE (579): n equals a,t,g, or c
gtgtactggtaccatagacatacatatactcacatacacaaagacagagtgacagggcattggaagtagttgtgacagtcagctaaaggatttggggccctcagtgaatttccatgtgttctactctgccctgtgacttactggcaccaggatttgcaaatcagctagagaatgcctaggcttcagtttctctgggttctccatctttaaagctgaacctaaaagaaggactgtgtattccagtggcccatattacaagtaagtgctctttacacctaggatcctggaaaaagtctttttctagattcagatgaattatattaaagggcaatttccartgatatgcccttttgtttcttggartgaaggaggggaartacatgatgaacctattgattattarattarcagggarctcaaagcttgtctgatgtcatcttatcttccanagggtaaatttaggaggataaatgacgagtttcagtagtcaaggtgggtgtcccagaacccatatctcttgactgagactttagaaatatttttctattncatgaatgaaattcanggaanaagtttggnggtggc

SEQ ID NO: 61 - DNA, 594 bp, Homo sapiens
  SITE (593): n equals a,t,g, or c
gtataaatgttacttaaaaaaaatatatttggccgagcacagtggctcacgcctgtaatccccacactttgggaggccgaggcgggcagattgcctgaggtcaggaatttgagatcagcctggccaacatgatgaaaccccgtctctactaaaaatacaaaaattagccgggcatggtggcaggcacctgtaatcccggctactcgggaggctgaggcaggaaaatcgcttgaacccgggagtcggaagttgcagtgagccaaggtcatgtcatcattgcactccagcttgggcaacaagagtgagacttcgtctcaaaaaaaaaacttacagacttttttttccttttgtaaattgttagtttaactttgaattcaagatgaaggatttattactttatctccccctaaactaataagactgtctggcacagaggaaggacgtggtgggtggcatgtgtgcgtgtttcacgcacgtgtgtgtgtctccarcttgtgctcacgcccagggtaacagcaccacccgggagacccctggcaatctgattctgccgcactccctgcagggaaagctgataggctgctggcttgtana

SEQ ID NO: 62 - DNA, 300 bp, Homo sapiens
  SITE (267): n equals a,t,g, or c
  SITE (268): n equals a,t,g, or c
gcgaattacagaaagcaattcctskggagcwkcagaattgggaggttgaaccccatcatgtctaactccagagtccatgcttttaacaatgttttcccgagataagtgcgtaattaaatatatacaagatggattttagatactacagagacaagattattaaccttagtgcttatgtatttgcttaaatacatggtaacaatgctagtttttaattaggatgttaatgkkttcatttcaaaatacattaatttaaataaggaaatnntttcaagaaaaatatcactctataagaatgca

SEQ ID NO: 63 - DNA, 451 bp, Homo sapiens
  SITE (232): n equals a,t,g, or c
  SITE (238): n equals a,t,g, or c
gggccatcgtgccagacgctgtccaagcgcagataatttgactgaattagccccggcccctgtgcggggtggagagggaagtgaacctccacaacctcccctcccctgaggcagctcctggttgagcaagctcggctgactgttgggcaagatggtcgcagagcagggcccagcccggcctcagtccatttgccccttccctggggagagcccccttytgsctgtgctkaanaggctnaccccgcagcttgcaggcctgggaggagccagcttccaatcaaagtcgcctgctggcctaccacgcgcaggccccgtgctcaggcgacgctggaggagctcgccctgctctcgggagccccctgcccagggtctgctgtgtggccgagtggtcacaggaggcggctgcctctggctctggactagggagatgcttgaggaatgagtgtcaggg

SEQ ID NO: 64 - DNA, 481 bp, Homo sapiens
  SITE (1): n equals a,t,g, or c
  SITE (30): n equals a,t,g, or c
  SITE (479): n equals a,t,g, or c
ntacagcctctctggaccccctactatagntaaagctggtacgcctgcaggtaccggtccggaattcccgggtcgacccacgcgtccggttcaggagtgcggacatacgtatggtctttgatgagtctcagtatattttatgctttcttttaagctcctactattgctagtaaatgactttaaggatccattcaaatatgaattgctatacaaattcctctgaataagtggcaagatcccatgtcttacctggaataacatgtcctcaactttactgtaatgggagaagttaaatcttttaagatttgtggagaacgagagctgttgcaagccagagattactgtagaaagaccaaataacagtaagatgataagcttttagactttcaggctctttccttctaaaagaccatcgtgaatccacactgtgaggacaactgctcacggttgttagcccaattacctgcagcatttaaatnat

SEQ ID NO: 65 - DNA, 342 bp, Homo sapiens
gagaaaagaaagagacagacacagaagcaaagcaaatgtggcaatactttcaaaagacccgttaagttagatgtgtgagatggctacactgtacatgtgtgtaacactgkattaaagaatgtaaagctaacacaagtgaaacagttcaaaagaaaaagtcagaggaccctaatgactcaatcactgcggagggctaacctggctgcaccctagaccaaccaaatcataatttctggggctagaattcaggtatcagtattttgtaaagctcctcaagggatctaaaagtacagccaagattgaaaactacttgccaggcgtggtggctcatgcctttaatcc

SEQ ID NO: 66 - DNA, 302 bp, Homo sapiens
  SITE (11): n equals a,t,g, or c
  SITE (17): n equals a,t,g, or c
gggcagagagnattttnaaaagggaaaaagtggtgaaaaaatccttgacattttccacaaacttctaactgcttgaggaaaatgtcaaggagttagaagtttgtggagattttaggtgcctttcatgtacttcagaaccgytttgktaaatcttatggcatagttttccccaaaaagaacacaacctgggagaattgataagttgtaamcataatgatctggagagggtattctacttcctgaaatttttaatggggrtaaggccatctgcttctccatatgggagtgttatcctctcctgt

SEQ ID NO: 67 - DNA, 403 bp, Homo sapiens
  SITE (274): n equals a,t,g, or c
  SITE (275): n equals a,t,g, or c
  SITE (351): n equals a,t,g, or c
agtgaaactgtctcaaaaaaaaaaaaaaagaaagaaagaaaacacccctggctgcaggcttcgggcggccctgtgtcctccagctcttggggtggggccactctgacatcatgtgctgtttggggagtgtcatgaccaggagggcatctttkgttttttcttttaattaaaacaaatactaggctgggcatggcagctcatgcctgtaaccccagcactttgggaggccaaggcgggtggccttgattgcttgaaaccagaagttcaagaccannctgggcagcatggtgagacctggtctctacaaaacaaatacagaaagtactgggtgtggtggcatgtacctgtggngcgggaggatggcttgagcccgggagttccaggctgcagtgagctgtgattg

SEQ ID NO: 68 - DNA, 508 bp, Homo sapiens
  SITE (440): n equals a,t,g, or c
  SITE (463): n equals a,t,g, or c
  SITE (508): n equals a,t,g, or c
gggaagatggaaatatctggatagattcctaaaattaatatgtcatttttgcccatatgggccatcctattctctgtttcagttttattaatatttcatttattttagagtattttgagtctttttcttttctagaatttttaaagagactataggcatcatctagtctgacatgattattttctaggagttagaaccagagcctagagagatttagtgmcttyagacgaagaaactaattgcttcttataaagtgtgatatccagaccagcagaatcagtatcacctgggaacttgttagaaatacatactctcaggttccactccagacctactgaatttgatgtgtttcagcagtctgtgtgtttaaccagccttccagatgattctgaagcatgttcaagtttaggaaccactgttacagctcattgattctttgngcctccatcactaatcaaggtcnctgttctagagagcagcttgttattgatgcatgtgttttacctcn

SEQ ID NO: 69 - DNA, 591 bp, Homo sapiens
  SITE (469): n equals a,t,g, or c
  SITE (578): n equals a,t,g, or c
  SITE (582): n equals a,t,g, or c
gtgtaattatccatacaaaagcctgtctccctcagtgggttcttagctccatgtgggcagggaatgtggctattttccacccctgtatccccctttgcctagcccagtgcctagctcatagtgtatgctcagaaaaatagccactgaatgaatgggctgagcgtttaagtgaggggaaatatcaagatgcaggatcataatacacaatcttcattgccactagccatgtgtgactattaaaatttaattaaatagctatacttacccataatctatgcactctgtagccacgtggggctggtggctacgatttgaatagtatagattatagaagatcatcacagcaagttctactggacagtgctgatataggatgattgtacattcattttcaaaactatccctatgcttggcacaaagtaaatacttaagaaatgtttgattgaattaatgagcaaataaacactgnatctccctctcttattcttgagctacacgtttggatgtaaaagttgcttgtaccaaatagcccaaacattctttttaacttgcctaaacacattacattttctttgccncaanagtgccctt

SEQ ID NO: 70 - DNA, 612 bp, Homo sapiens
  SITE (506): n equals a,t,g, or c
  SITE (515): n equals a,t,g, or c
  SITE (568): n equals a,t,g, or c
  SITE (580): n equals a,t,g, or c
  SITE (600): n equals a,t,g, or c
ggtttcaccatgttggccaggctggtcttgaattcctgacctcaagtgattcaccctcctcagcactttgggaggccgaggcaggcagatcacgaggtcaggagatcgagaccatcctggttaacacagtaaaaccctgtctgtactaaaaatacaaaaaattagctgggcgtgttggcggacacctgcagtcccagctactcgggaggctgaggcaggagaatggcatgaacccaggaggtggggcttgcagtgggccgagatcgcaccactgcactccagactggtcgacagtgcaagactccgtgtcaaaaaaaaaaaaaaaaaaagtattgatagcatacttttaagaaatccaaatgtctttgtaaaagtaggtatttttcattctttcagtatcagttactcttcactatggttctttttcacatttaaatagaatcaaggaaccttttatctttggtttatctggtattttcagtgttagcaattttgaaaatctctantttttaccncaacatttttggctctttcattcaacttataatctgaattgccagaaaaaatnccgggggaaaangttaaaatactttctaaagntaaaaaatttgc

SEQ ID NO: 71 - DNA, 624 bp, Homo sapiens
  SITE (591): n equals a,t,g, or c
  SITE (604): n equals a,t,g, or c
  SITE (622): n equals a,t,g, or c
  SITE (624): n equals a,t,g, or c
gaaaataaatataatggaattaactcttttttgtttgtggggtcttgctccagcctgggcaacagagcaagactccgtctcaaaaaaagaaaagaaaatgtccttattacagtctcaggtttctcttgccctctgtcatcctagcagtgtggatggttggttgggatcttcgtgtcccgtctcagcacactcgagctctgaagtgaaagtgaggaagggcagggatgggggcacttgagcacaccgtgggccctctgacctcagacccaggctctgccccaccaagtgaccttgggcagggtaccttctctgagctttgtttcctccttggtaaaggcggataatagtgtctgccctgcacacagatgtggacgcagaagcacgtggtgcctgccgggcacaggagtggtgcacagggctcgctgctgtcgggagattgattgctgttgtggaaacgggagggtacttacagaatgaagcacattttttacatacagtacaaaatgagtgtgtgctttttaaatggattttaaaattcaaaatgcaaatctgcaagttttaatcttcccaaatgcttgattttttctatgnataaaagtagganaattgcaacagccttatnan

SEQ ID NO: 72 - DNA, 257 bp, Homo sapiens
  SITE (147): n equals a,t,g, or c
  SITE (160): n equals a,t,g, or c
tggctgacccaacacaaaggtcagaaagtcctcagaagcctctcctggcacctggcagtgagtcagggctggttaaatctggatgaggatagtgcagcctggagggctttcctcggagatcactggactcactaggtccaccctctnttcccagatctangaagggaaaacatgccaagtccataaamcaatagcaccatcaagtgkctattaaacattcaaatgttcatggggcagaacactgagcatagacatag

SEQ ID NO: 73 - DNA, 467 bp, Homo sapiens
  SITE (345): n equals a,t,g, or c
  SITE (434): n equals a,t,g, or c
  SITE (457): n equals a,t,g, or c
  SITE (461): n equals a,t,g, or c
gtttaaaagatttaagaaatgcaatttgctaacagtttaatgggtttattagggactttgagggtatatttctagaaggagaaatatttttgtttctctgaaagttctagctactttattctccatagcccttaaaaacttttcagatttgtcttcctataattcgtagagatttggaaaattagacataaggcacctgttttcttaaatgcatggttacctattcctttgtcctatcctttcaagacaattctgggaacagtttgttcagctttacgaagaaaacatttcttcatcacctgagttttcggtcacccatgaattctaagaatattttagctgatntcagggaaaaagtattcaatattagtgattgataattatatgaaaaatagaccagtaaagcaatcaagtggaaacttggtagaaatgtntagataagtgacctggtccattntgcnttttcc

SEQ ID NO: 74 - DNA, 592 bp, Homo sapiens
  SITE (400): n equals a,t,g, or c
  SITE (523): n equals a,t,g, or c
  SITE (546): n equals a,t,g, or c
  SITE (591): n equals a,t,g, or c
ggccagttgactattattagctgtcatragtaactcagccatttggaagcatttcctggacaaaattacattatacctgtgaagaaaaatatagaagctttcaagctgtcattctgttttggccctgtgtgaatttggtatattaaattgacgcttgctttttttttcagtagagttttctttttaatcaatcaaacgcctacatttctggaagaaaaagtccaattagatcattacaccttaactaagaaggcaaatcttataaattttgcttgaattgttcttactcaaaactaccttagaatatggtatcttatgaaaatataatattcttaaaattttggaggataaaatgaaaagggtataaacttcaattagaactttaatcctaaaatattgntattcttgtatttttggagttttccgtcccttacaatttctccaaattggctattccccaagatatccactgttttctacagattttagaatataaaattaaacatatcaacctaaaatctanctatgaaatggtatttcaagaangtttatatttttaaatgggttattaaaaatattgtaatttccaang

SEQ ID NO: 75 - DNA, 149 bp, Homo sapiens
  SITE (5): n equals a,t,g, or c
gcatncccctgggtcctggtggccgagacagggagaggcacgggcagcccagcatcgtgcagcggtttgactttgtcagtagttcttccgtggctatttgccaagagcaagggaagcagaggccggggattgtcactaactgggtatgt

SEQ ID NO: 76 - DNA, 530 bp, Homo sapiens
  SITE (3): n equals a,t,g, or c
  SITE (458): n equals a,t,g, or c
  SITE (480): n equals a,t,g, or c
  SITE (481): n equals a,t,g, or c
  SITE (529): n equals a,t,g, or c
ganacatcgcatattggctgttaggaaatattgctccactgggttctgcaggtcttcctaagcgcagtggaaaattccccccacgctcatgagggcgagtgtgaagaaggcaggtgctgtccgcttcggattatggtcatagcttgcactcgcggctcccctgcctggtctctgggacccccaggcatccccagacctccctggcctcagccagttcccgccgcttcaccatatggcagaacacatgcgcggscggccggctcacagatgggcgtccctgcgtccggcccacccgcctgcggtcctgtgwgctcaccctgccctggtctctgcctggactgtggatgggggtgagtggggcatggaggcgttctgcacccaccagctgtcagtgccagccacctgcctgcccagcatcgggtctgtgtggcagcaccttgtcagcaagtggaggtcanatgtggggtcagctgggcgcannggctcacgcctgtcatcccaaaatgctgggattataggcgtgagctgnc

SEQ ID NO: 77 - DNA, 433 bp, Homo sapiens
  SITE (420): n equals a,t,g, or c
  SITE (422): n equals a,t,g, or c
gcttctaagtgaatatgatactgactgtggcctgttcaggtctagttaagaagaccctcctggtgggttttacagctttgtatttctcactgtgtcttgcacaaagtaggtgctcaagatgtattaatgaataaacattatttcagcaaacagacttcttaaattggtgcctagctacaaaggcaccattagggttttgtgccagctgtatgaatagtaagtcaataaggtagccataaaaaatgacagcatccagaagcacaacaatggaggatagagaagacaaaattttaacaggcaaatagaaaagctgtaaaattatatcagagagagagccttttgtatagaggcctaaataccttatttgagtacaaccctaagttgaaatttctgaatttctcaaaagaacctatctgctgntnaaattggtgac

SEQ ID NO: 78 - DNA, 320 bp, Homo sapiens
gtgcttctttaatttgttccacaaaaattatgctgaaatggacctgaatcagccctgggtgtgcttctgttggcgcctgctgctgaggcccggcctgcccatcggcctgtagtacgccatcgaggtcatcatggagccagccagcttctcttctcatcaaggaggcagagacccctggtggaagccaagagtgaccgaagagggcttgcatcacgtcactccagtggttccctccttgtccaagtcctcgttttaagggcatggcccgttggctccagccgwtggcttctgttcaacggtccttgctcccatcagaggtg

SEQ ID NO: 79 - DNA, 143 bp, Homo sapiens
gaatgtctgcaacttactttggagtatgtcacctctgaagaattcagcattaaaatccttaattttatttattattaactctttattttaatccttttttacattttaaaatgtgtattatttttatcatcaggcctaccaca

SEQ ID NO: 80 - DNA, 643 bp, Homo sapiens
  SITE (635): n equals a,t,g, or c
  SITE (643): n equals a,t,g, or c
cgaggttaaagcagtagcaacaacaacaaaatgctatcattagtaaatgttttgtttattacttagtgttaacagagctctcagagtgtgctcttaggaagacacgcacctcttaaggtaggtgtgtcttgcttagtgaggttgaacaaatcacagtccaggcaatcttcattctgcatgatggcattgctgtcttcatatggacagacaagtagaatgatgttggaaatcatgtatttagaattagacagtaatttaatttttttttcagaatgcacaaggatgttgtttcttggagtataagagaattgaattttagcttagagccactttactgtgggagcaactttttttaaattgaaaatttctaaatgtgacctctgttggcatarctggtattctttgaaagtaattaaaatgaaaagtattaccagtccatatcttgkgtaaatcttttgagttagcatgtttarargargtaggactggtgtcagaatattctgagaaagttagggtgggccataatttctcagctatgctttctgtactagaaaacaggagagatttatgcataggagtgggataagtggtttaatagattgttaataaaatacatatctgtttgttgtttttgntgttggtn

SEQ ID NO: 81 - DNA, 372 bp, Homo sapiens
gcatcatcattctgagttaccaacaggaggggtagcagacagtccaaggggcaaggcagggactcccagctccaggctccagcctctcctcccctccaccctctcctggtcctgtcctgaaatctttggctcccttgaaacttgttatgcccgggcaaatgccaccctcgtgccactgtattcccaccacctccaatgagtgtcccccacctgatggggtcacacacttgtccagccacctgcacagaaaagcctcatggacacagccctgtgaggtcagaaatagaccgaacagggtcactcggttggaaggcgtggtagtgttagaacccaggtgtttgaactcggtctaatattcattccactctttca

SEQ ID NO: 82 - DNA, 584 bp, Homo sapiens
  SITE (506): n equals a,t,g, or c
  SITE (520): n equals a,t,g, or c
  SITE (561): n equals a,t,g, or c
  SITE (572): n equals a,t,g, or c
gcagatacttagcttagaagtgaacttttgggacccaactcttttgcaagttggaggcttcctgtaacgttaatttcaggaaatcctaggcaaatatgcagttactgttctagaagatacataggtagtgtgtactgtgatggaaattaaaatgtcactgttaaaaggtttgcattttgtgggcttggaagggcctaaaacttccttcttaggctttctcttcactagtgggctcttgcattatattacttccagagaaaggcaggcaggattagaggcatggcaaggagaacaatttgagaaatactatactgtgcaaaagagcaaagacaactttaatggcaatgaggataaattaacttctttgactcagtcgccaagtaagataaatccataattacttattccagtttgatttttacataagaagttcttctggttattctttaatatagatttgattttcttttccctaaattttagccttagattactggacagtttantcattctggaatgnaaaagcttactattaagkggctgatcaccttaccatgaggntacttttgacnaaataaaaccct

SEQ ID NO: 83 - DNA, 565 bp, Homo sapiens
  SITE (369): n equals a,t,g, or c
  SITE (493): n equals a,t,g, or c
  SITE (521): n equals a,t,g, or c
  SITE (538): n equals a,t,g, or c
  SITE (556): n equals a,t,g, or c
ggagaccctatctttaaaaaaattgtttttaataaaaataaaatgctgcagtcctcgtacaaaagcaggcctgggaaataacgtgtaatggagggagcatttgacatcagtaggggacggggagctggtgagtaaatggagctgggaaatctggctaagtggttgcctttggaaaaaaataatccaagagaaataaggagtcagaccagaaactgtggttcacaagagaggaaaaatacggtcaatgagtgtaggtaataagcttaatcttaccaagaatctaacaagtacaacttaaacaagactagatttttgcctacggggttggtaaaggctttttttcatgttggtgagggtggactgaggcanggatgttcatagagcagctgggaatagttttaataaatttaggggccccatggcaggactgggagcagcacagaccacacagttggaaacatgcatcggggaaaaaataacttttgacccttgnacatgatccattgaaaaaagggtaggtnccccaaaaaacaccttntgaaccaagcttaattgnaaaaatgtt

SEQ ID NO: 84 - DNA, 418 bp, Homo sapiens
  SITE (308): n equals a,t,g, or c
  SITE (359): n equals a,t,g, or c
  SITE (397): n equals a,t,g, or c
  SITE (415): n equals a,t,g, or c
ggtgaaccaagattgtaccaccgcactccagcctgggtgacagagtgatactccatctcaaaaaaatagaaaaatttttaaaaattaaaaagaaaatcaggagaccttaatatagtcttgatgtgctctagctaggtggaattcctccccaggctctggagagtaaagctgctgaagaactcatgaacaggaagttgtagcatataggccattcaaaattgtctctaggctgggcgcagtggctcatgcctgtaatcccagcactttgggaggctgaggcaggtggatcacctaaggtcaggagtttngagactaagtttgggcaacatggtgaaaccctatctctactaaaaatacanaaattagctgggcatggtggcatgtgcctgtaatcccngctacttgggaggctgangca

SEQ ID NO: 85 - DNA, 381 bp, Homo sapiens
  SITE (275): n equals a,t,g, or c
  SITE (338): n equals a,t,g, or c
  SITE (342): n equals a,t,g, or c
gagcacctctctctctggctagcctatttcgacgccacacaccactccaccctccgtcacctctctccccacttctctcactcttggatgacaagccctgagcgctgggccgtgtggcttcctccccatggctcttggcctctccttatgagctggaaggcaccaggcagggtcctcggaaccccctggcagctcactttgggtacccaggtgggctgctggcggtgtggggtgtggaggtgcgttgtgttggggaaaaacagcctaaggctagntttggggttttgtgggggtgtcttctcacctgcgtactcagaacttttgaaaatgggactaancccnagacaaggtgggcttagaacctttgcaagcctgggtttc

SEQ ID NO: 86 - DNA, 376 bp, Homo sapiens
  SITE (364): n equals a,t,g, or c
ggtcaggagatcgagaccatcctggctaacacagtgaaaccccatctctactaaaaatacaaaaaaattagccgggcgtggtggtgggcacctgtggtcccagctacttgggaggctgaggcaggagaatggcatgaacccaggaggcggagcttgcagtgagctgagatcgtgccactgcactccacctgggcgacggagcgagattccgcctcaaaaaaaaaaaagaagagtttaagtgccaggtgaaaatacactacatctctgacaatgtatataccattgkcatttaaattgtcatttaatacaggtttacttctgtttatttctacccatgttttgttcttctcatgatgtgacccanggggatttagca

SEQ ID NO: 87 - DNA, 460 bp, Homo sapiens
  SITE (367): n equals a,t,g, or c
  SITE (389): n equals a,t,g, or c
  SITE (414): n equals a,t,g, or c
gttcagagtgaacttccaggcaagtggtgagttcttggggcatgtcagccaaggaggctctgatttaggcttagccagagtctgattaagaaaaggagggtgggactggkctgatgggactcaggctgtggagtgagaagggagggcatggggagagaaggaaggctgggcaggagctctaagagaagagggcttttgggaactgagggtgagcaggggcagaatgacatccctcctttacccagtgcctaccgtatgccaggcactgktctgagcacctagctcgtgttaattcatttagccctcacaccatcaggcgtgctcccccatcttacggaaaaggaaagtactgcatagggaggctgantaacttccccgtagtcacgtancaagtaagtgctggaaccagtgttnaaccaaacccgattcccatagacttaactttgaagtattccaactg

SEQ ID NO: 88 - DNA, 59 bp, Homo sapiens
agaaagctgactaatccaaagggcaaggtggtttaccttaaagaaaaaaaaaaaaaaag

SEQ ID NO: 89 - DNA, 342 bp, Homo sapiens
  SITE (326): n equals a,t,g, or c
cacaaactgagtttcttgctgcacgcagggatcgtttcagctttcccgaaaaggcagcagtctctgttgtggaaagtgacagctgttttacagctgcaaaagcaatgtactacaatatgactttgtttttgtttcctttcacattagtgtatctcctagctatggactaaataatacatggggggaaataaacaagtattcatgagggtgaaaatgtgacccagcwggaaaattacaactattttcaattgcgttgaatakggtgagtaaattttagctttttgagttacaatttggctgagatatcacagttagtactgatatanaaagatattttgtcat

SEQ ID NO: 90 - DNA, 526 bp, Homo sapiens
  SITE (453): n equals a,t,g, or c
  SITE (459): n equals a,t,g, or c
  SITE (480): n equals a,t,g, or c
  SITE (494): n equals a,t,g, or c
gtggggcaaaaacccacctctacaaaaaggacaaaaattagtcgggcgtgatggcaggcatctgtagtcccagctacttgggaagctgaagtgggaggatcacctgagctctggaggtggaggctgccatgagccatgatcgtgccactacactccagcctgggtgacagagtgagatcctgtctcaaaaaaaaaaaaaaatcacccttaaatcaacaaaaagacctcatgctcatgcagtggacatttcttggcctgttttcctgtgggttttcttcagcatgatatgaagcaactgttggcataccagtgggataaataagaaatggaatcatttggctgcctcgtcacttgtgctaatggcagttgtacacacatgacatgtggaagtgacctgtagcagcggkcactcattttaacaattgaactctgctgggttgggkatttaccttngctagnaaaagaaatatgaaatatttnctctaaaaaaaatnaattttcatcattcccaaaaaaaaaaaaaaaa

SEQ ID NO: 91 - DNA, 204 bp, Homo sapiens
gaatcctttttgaagagttcagaggaatagatgtggaatggctctgaggaccaggcaggaggaaccctacaacctgagtttgcctttgtraggcattagtatagaccaaataaaaagctgcagaaattggaaagtttatgttttaaataaatgactgtgataaatttcaaaaaaaaaaaaaaaaaaaaaaaaccccgggggggg

SEQ ID NO: 92 - DNA, 323 bp, Homo sapiens
  SITE (1): n equals a,t,g, or c
  SITE (8): n equals a,t,g, or c
  SITE (278): n equals a,t,g, or c
  SITE (293): n equals a,t,g, or c
  SITE (321): n equals a,t,g, or c
ntcagcantgctgtattccttattcatctaatggtagttcagagcatgaagaagtttaggaaaggtgatatctgagaataatagaaaaataatatccataggttccttcctttagggccttagagtttatctgaggaatagagtagtgcatgtgatgaaggttttaaagtagagtgttagagctgtgggtcatactagaataatagaaaaattggtcagagagaatgagttgatctgatgatgaggtaagagagttctgtggagctgaagattagttncagttgctaagttgntacttggttctaatcttacagattgttnta

SEQ ID NO: 93 - DNA, 513 bp, Homo sapiens
  SITE (453): n equals a,t,g, or c
  SITE (468): n equals a,t,g, or c
  SITE (475): n equals a,t,g, or c
  SITE (481): n equals a,t,g, or c
  SITE (496): n equals a,t,g, or c
gcccaykcgtccgcccacgcgtccgcccacgcgtccgggccaccagaagtttgagcctctttggtagcaggaggctggaagaaaggacagaagtagctctggctgtgatggggatcttactgggcctgctactcctggggcacctaacagtggacacttatggccgtcccatcctggaatttgccagatgcatctcaagtaagccagctgctggatttggctctgggcccttctagtatctctgccgggggcttctggtactcctctctaaataccagagggaagatgcccatagcactaggacttggkcatcatgcctacagacactattcaactttggcatcttgccaccagaagacccgagggaggctcagctctgccagctcagaggaccagctatatccaggatcatttctctttcttcagggccagacagcttttaattgaaattgntatttcacaggccanggtttanttctgnttcttcactataatnttatgttcttgacttct

SEQ ID NO: 94 - DNA, 486 bp, Homo sapiens
ggagattttcttctcttttgacttgggctatgtaatttttcaaaattatatttcatctgatatctgtagggagactgtcagatcgtcccgcccggctactggacttggaagcaagtctcatttctagctttctgattcattcttgagcaaaacggtcacttttgattgaaaagagttggtatagtaaaactctctaggtcatttttaatatctgaaaatacttctgattgttgaaaactaagaagaaccttttatgttatccttaaattcacttcattcttcaggatctgtaagatatttttgccattgacagctgatatttatatgatgttagaccccatcctgggcacatacctgtgtcccgtaacattgtgtttataattcagaataacatgtagaacattccctcagcagagaagtatattaagtgtcataccatgaccaagatgaaatacttctcaacataatgttttaaaaaaaaaaaaa

SEQ ID NO: 95 - DNA, 460 bp, Homo sapiens
gttccacgcgtycgcccacgcgtccgcaataccttagtaagctcctatgtatcctttcctggtcagtttcctgaatcaccccaagagagagaaccaatattctgcttgtaatgcaaataatcttttctttgtatttttaccaattaagtatactggttgtcacactttttaaaacataatttctaaaccatcataaaatgatacttttgtaaatacaaaatcatgtacttgaatgcattggcactgtcagtttactatcagcatttctaaatgtttatgcatgtttgctcactttatgtgcttatctctccatcagccaatgacagttgatcaatatgggatcaatatgggaccacacttcgagtagtactgatgtctacattccttaaaaatagtctaaacaggtagaagtaaacattaataaaatttaataaagtattaaattctatttaataaataa

SEQ ID NO: 96 - DNA, 740 bp, Homo sapiens
gctgctcagaactggcggtttttcccagctccttgcccagaccaatacttccatgctgtcttcaagccctgcttcctgcacatctcccagcccagatggggagaacccatgtaagaaggtccactgggcttctgggaggagaaggacatcatccacagactcagagtccaagtcccacccggactcctccaagatacccaggtcccggagacccagccgcctgacagtgaagtatgaccggggccagctccarcgctggctggagatggagcaatgggtggatgctcaagttcaggagctcttccaggatcaaagcaaccccttcttgagcctgagattgacctggaagctctcatggatctatccacagaggagcagaagactcagctggaggccattcttgggaactgcccccgccccacagaggcttttatctctgagctgctcagtcaactcaagaaactccggagactcagccggcctcagaaataagcctgagagaccatctttagcagcctcagcactgccaggcctgccctgaaactccagatcctggctaagagggaaatagctccttgggacacaaacaagaaatgtggacaaggagggacatttgcatactcctactgtctgtgtggtcacagctagtttctgtcagctgggctctctgggagaaagctggctgttgtccaatgccttccttggcagccaagtggataaaacctttaggagccccaaaa

SEQ ID NO: 97 - DNA, 586 bp, Homo sapiens
  SITE (578): n equals a,t,g, or c
  SITE (581): n equals a,t,g, or c
ggtttaatttgaatgaaatcaaccatttagaataaattattggaatacagggaatagaaaagaagtttaaatagcattcagaagaaataattggataagtccaggaactgggagattctacctgacaactggcctggatctttaaaaaatcttgaaacaagttatggttctttgtagaataaaagagacccaagagacattaacagtgtgtgaacctaaattgcatcctggaacaacaacaacaaaacttcaaatatatttttgaaaaattagagaaaaataaatatggactggatattaaatattaatataaataatagtactgtgtgactatgttggagattacttattcttgggaatacacttaaagaaagatgaaataaagatggtaaaataaaatatagattatgtctatatgtaaattagtaaatagaaatagagcaaaaaataaatggataaagcaaatgtgacaacataatatttataattctaagtgaagaccatagcctgtcattgctctactcttttaattttcccagacttaaaagctttcataatgaaaacttttggggacaacngangatcc

SEQ ID NO: 98 - DNA, 532 bp, Homo sapiens
  SITE (516): n equals a,t,g, or c
  SITE (521): n equals a,t,g, or c
  SITE (528): n equals a,t,g, or c
  SITE (530): n equals a,t,g, or c
gataaacaataaaatattgtgaacatcttcattagaatatttttgtcagctttggaggtaggatctagataaaagtttttaggctaacccaaaatatttatcttcagtaatgatatgccttttgctgtgtatgacatctgaaatgtggataatactgaaacgctctcagtcttaaacttataagctacactaaaatctaattaatgaattgctgtaaaagttgttgattattaatataagctgtagtttttaactttttatctgctgcctcttgtgttcatttccttttaaaggtgattggtttctgtttgtcatcaaaacataaaaaccttaaaggagtcttacagattttttgtgctgttaggtggcttttcccttctggctctttttttttaaacaataattaataactaaaatatttatgtcttattgaatatcttatggtataataacataatttatcttaaaataatyaaataggatattcatggatttttasatctgcttgtgagttgngacanatttatnanta

SEQ ID NO: 99 - DNA, 352 bp, Homo sapiens
  SITE (9): n equals a,t,g, or c
  SITE (328): n equals a,t,g, or c
  SITE (330): n equals a,t,g, or c
  SITE (342): n equals a,t,g, or c
ggtgaattnatagatatttatttcatactttgggacataatcyaacagtacattattttgttactcaaattgttctactttggccattgagagctctttccattggttcctgtgttcctttgtttgtttgcttcttttgagcatttcttgctttccgacactacaagatgctttaggctcatcttgtatattccctgccccagccctagaatcagccgtttayccaaggagccctgattcctttcaytggagaatggtattgggaaacaaaggatctagacactggctctgtttgttactattggggtgtctttgcttctaggccctntnagaagacagcgntcagaaaata

SEQ ID NO: 100 - DNA, 356 bp, Homo sapiens
  SITE (51): n equals a,t,g, or c
gctccttgtttaggctggtctggaactcccgacttcaggggatccgttcgnctcggcctcccaaagtggtgggattacaggtgtgagccaccgtgcccagccctgaaatagtcttaattgcttgtttttcttttttgtctgaggtgtgctttttaaaatctctatggagatggagaagactgacattctctggcctgatgtgaaaacctctcattaaaactgtgtctgtgctttgtgggctgaaagcatgaaacactggaaattttaaacaaacgtatgtgaatgtgttaagaagccaagagtccggycctctttcaccagactgtatggcctcagatcagcaagggaagtattgg

SEQ ID NO: 101 - DNA, 555 bp, Homo sapiens
  SITE (29): n equals a,t,g, or c
  SITE (30): n equals a,t,g, or c
  SITE (31): n equals a,t,g, or c
  SITE (35): n equals a,t,g, or c
  SITE (36): n equals a,t,g, or c
  SITE (535): n equals a,t,g, or c
tcaggggtgcagtgagccaagagcgcgcnnntgcnntccagcctagtcacagagcgagattctgtctcaaaaaaacaaaaaacaaaaaacaaaaaaactgtataactgttggctccaattaatccccacagccactttttaagacaagtgtgagccctcccattttatagaaggggtgtctgcagttaggtgaggtgcccagcatcatgtgccactgtagggacagcagctgagactctgaagtccttgtggcatccaccacaccacattaccctccgggcagctctgccagggctttcctgacatgcaatagttgggggcagaggaactcaggaggctttgtgccctacaggagccccatgtcaggtcctagagcaagaacatttgaaaaaccaaggccaggaatccatttatccacttaggargctctatagggagcagggtacagagaatgttgtcacagaggaaatagctagtaaagctttkagtcaggaattaaatgaggttgaggattaaagagaggccaattgaccanagcaaatggccatgaaaaat

SEQ ID NO: 102 - DNA, 850 bp, Homo sapiens
  SITE (747): n equals a,t,g, or c
  SITE (783): n equals a,t,g, or c
  SITE (800): n equals a,t,g, or c
  SITE (811): n equals a,t,g, or c
gctgawctttatgcatgttgatctaatttgttcattcaactgcagtgaaaatcaatatagatcaacatgcataaagttcagtaactattaaatggagaagcaagcaaaagcaacaggaaaattaaatcaggatgctgagggggaacaggattgctggccatgaattttaattgaatttttgacggggcaagctacgttacattatggcagaaaaaaagtgcaactgacatactacaaagagattttcactgcagttgaatgaacaaattatttcagtgtgacagccatgactcaagttccaattagtctgaaaagggtactttggaattgtcccatattaatcagagatggcaaaagaaaaagttctcatattaccaggttgattttgtgtctcatttcaaattttaatttaaaattatggttttcatttttgtttaccttaaagtgatgcttaaaagtggcatgtaattaggacacttaggtttgttgaaagcattttcgacatttgtataaaagaatttgtgataaatatatccaggtgctcaccaaagaaacatgtattaacaacttaaattagatttttctaactgatagttttcactcatttataatcagtaggagagactgtctagatgttgggcagctctatgatttaagtctgtaacatgktataactgaatttagtaccctagtttggtaagctattaggatttctaatagaacttactcccctggctcccagcctangttctttaatgcttctggatcctggctcccttgcanctgaaaggtattgagcngactgggctgntataaagccttgtagcataaaagtgccttaaaaaaaaaa

SEQ ID NO: 103 - DNA, 162 bp, Homo sapiens
gagcagaaagtagatgcttwatggcagtgttctctgacccagacatgaatcagaatcacctggaagggcttgttaatacaaattgctaggccacaaccctaaagtttctgattcagggtagggcaaggcgaggcttaaacttcaggccaggggccactttaa

SEQ ID NO: 104 - DNA, 610 bp, Homo sapiens
  SITE (559): n equals a,t,g, or c
  SITE (565): n equals a,t,g, or c
  SITE (571): n equals a,t,g, or c
  SITE (578): n equals a,t,g, or c
  SITE (598): n equals a,t,g, or c
gattaggagggaaggtagaagtaagtgtctaacctctgaccctcatgagcctcatgggtccttacgggccatgtcctttggtttccgtgtggctttctcttttggaggatggagggtacttctttgttcccagggaagaaaggtgggacacattccagcacacctgtctagggcctggcgagggcttagcaggatgggaatcctgtctggagagggtgaaaggactgtcgcagtcagagttcccaggaaacctccgatacccgtgtggggtgtgcagataggctcttcctccacggccttcacggttgccatggtagcagcctggctttgcaaaactcagagcttccatccaggcaaatatgtacaggaagcaggagcaggctggagccagagggtcgtgtagacacagtccccagaaagatgatgtagtggagatgattccgggcactctctcctcggcgtggtctttacagagatcagctgctctgarargctcccttggtaaaccttctgccttctttgtccccgatctggggacttcatgtctcattaggtccanctcttntccctnttatcgnataaaccaaaaaggcatcangcattttgacta

SEQ ID NO: 105 - DNA, 531 bp, Homo sapiens
  SITE (376): n equals a,t,g, or c
  SITE (416): n equals a,t,g, or c
  SITE (460): n equals a,t,g, or c
  SITE (495): n equals a,t,g, or c
ggctgttctgtctgaattaagtggtaaaatgacattcgtggagaggattaaaaatctaatacatgtgctttattttgacttttggtttcaaatgtttgatacgagaagtgggagaagttttacagtgaagttctaggtaagtcatgtttctaatcaatgattaataagtcctaactttccttttgcctttgaaggtgagcgtatataaatataatgtaagaggatagtgttgttyaaatgaaatgatgaatggcaaatgtaagatgatctatcaatctcacaaatattatagaaatgttgatattataggctcagctagaaccctttggtcatcactcctataggacactacaggaattaaaaaaaaaaaactacnaagtaaagcacttatgatttctttaagcaactatatacgnattttactatacttttttcatctttaaaaaaggcaaaatatatntcaataaacacttgatgaaggcagacatttaaatnaggagctacacatatttctagcataactatcaatgc

SEQ ID NO: 106 - DNA, 738 bp, Homo sapiens
ggtgacaatttagacttggcatccagcatgggatagttggggcaaggcaaaactaacttagagtttccccctcaacaacatccaagtccaaaccctttttaggttatcctttcttccatcacatccccttttccaggcctcctccattttaggtccttaatattctttctttttctctctctctcgtttctctcttctctctcctctcctctcctctctcttctcctcttctctctctctccctctctctcctttgtccagagtaaggataaaattctttctactaaagcactggttctcaaactttttggtctcagaccccactcttagaaattgaggatctcaaagagctttgcttatattwkgttcttttgatacttaccatactagaaattaaagcgaatacatttttaaaataaatacacatgcacacattacattagccatgggagcaataatgtcaccacacacacttcatgaagcctctggaaaactctacagtatacttgtgagagaatgagagtgaaagggacaaataacatctgtgtagcagtattatgaaaatagcttgacctygtggacttcctcagagggttggtccctggatcacactttgagaaccatacttgtcctgaagtattggagttcatgtctaacttcttcccagggcattatgtacagtgctttttattactgtggggagagggcagtgctaaataaattaatcactactaaaaa

SEQ ID NO: 107 - DNA, 436 bp, Homo sapiens
  SITE (277): n equals a,t,g, or c
  SITE (421): n equals a,t,g, or c
ggatggctaaccaggggtgaagggcacataaataacatccacttgtaatccttaatctgctttcacactcactcctctcttccactttgtttcctgtaaagtataaatttcttagtctcatcatatagaataacccagaatgatatgatttcactaccatggatttatagaaattatttcttcttccacatttttttgctgaatcaactgtcttgtgtcatctctgacactgttattctcattattammmamaattctattaatggsttcatatagncttttctctaaagataatattaactaagtgccttttatattctaaggtctttatttacataatcttgaatgaagccctggaatcttgcagggaccttcattatcttacttcattctgtggattttttagtgacactttcatttnctagccctactttta

SEQ ID NO: 108 - DNA, 611 bp, Homo sapiens
  SITE (510): n equals a,t,g, or c
  SITE (542): n equals a,t,g, or c
  SITE (569): n equals a,t,g, or c
  SITE (591): n equals a,t,g, or c
gcggacgcgtgggcggacgcgtgggtaaaactgaggagacaggtaaatcgcagcttctctccaatcaccagcagcagcttcaggccgacagcttcaaagctaagcagatggaaaaccaccagcttattaaggaggctgtagaaatgaagtctgtcatggactctatgaagcagacaggtgtagacccaacctcgagatttaaacaagacccagattcaagaacatggcatcattatgtataccagcccaaatatctggatcagcaaaagtcagaagaacttgatagagagaagaaattaaaagaggatagtccgaggaaaactcctaataaagagagtggtgtgcccagccttcctgtatcgttaacaaaaaaaaaaaaaaagggcggccgctctagaggatccaagcttacgtacgcgtgcatgcgacgtcatagctcttctatagtgtcacctaaattcaattcactggccgtcgttttacaacgtcgtgactgggaaaaccctggcngttacccaacttaatcgcctttgcagcacatncccctttcgccagctggcgtaatagcnaaagaaggcccgcaccggatcngccctttccaaacaagtttg

SEQ ID NO: 109 - DNA, 660 bp, Homo sapiens
  SITE (538): n equals a,t,g, or c
  SITE (560): n equals a,t,g, or c
  SITE (612): n equals a,t,g, or c
  SITE (616): n equals a,t,g, or c
  SITE (618): n equals a,t,g, or c
  SITE (629): n equals a,t,g, or c
gtaactttttataggtataatttgttatttttaataatgcttataaaagtttttttaaaaagtaagctgtattgtagaaatcatcaaataccaactagaattatattttaatattttatagattttactcatagagtaaaaattacattgttagatatgtaaggggtggtaacaccttttaaaaatcttggttgtccttgtttgttctgtagtttatgaaaaacagagattctaaagattgcacctatgcatgaaatctgatttgctcttttgtgcagtataagagtatggctgatttctttcaattctgagaaccttacataggagaccccaacctctacataggttacaagtgaatagactctgatttccgttgattttatttcatgtaaaactataaccttcacaactacacatcaatctcaaacttctttgaatggctcactacttaaaagtcatttttccctaaatgatatgtatagatataagtgatctgaaaaatattttcaagattttattgccttcttacctatatgcnagaattgacatatatgcctatntaaaagtaggaaaatcctgtatatgatgaaacaccattacgtagttaaaatncatnancccagattganaaaagaatattctgcagatttgggaatacaa

SEQ ID NO: 110 - DNA, 527 bp, Homo sapiens
  SITE (481): n equals a,t,g, or c
gcttgtaagcttattgaactatttcaagtagaaatagaaaatatgttgtatgtgttttgctgctctgcatcataagcattttcttataatctttcccagtgttgwcactgatgcaaatggaataattgattcataacattctttcttattaagttgggctatgacttcagaattatttttttaaaatgtgctcaaagaggaaatagcctaagaaaattttattttttaagttatgttttgatttctgkttacttttttatatgtttactttttrttgaattttttaatgttaaaaaatttaatttttaagttatattttgatttttgktgytttttaaccatatgtttactttttattgaatttattaatattgcaaagttcttgcactgccaaaccatgcctaagaattcaaagaaagaaatggtacagtagacggsctcattcacccatcatacagtatcttaaaacttgattcatgtncatttttgatattttcatagtcttttaagaagttataacgagttgg

SEQ ID NO: 111 - DNA, 611 bp, Homo sapiens
gcccacgcgtccgcccacgcgtccgcccacgcgtccgcttgctagctgtgtgggctgggaggtctggtagggctgagcttgtaagaggatcaacatgcctttggctagagatttactacatccgtccttggaagaggaaaagaaaaaacataaaaagaaacgcctagtacaaagtccaaattcttactttatggatgtaaaatgtccaggttgctacaagatcaccacggttttcagccatgctcagacagtggttctttgtgtaggttgttcaacagtgttgtgccagcctacaggaggaaaggccagacgacagaagggtgttcatttagaagaaagcaacactaatgattcaaacagcttcctgaattttaattttgtgttgtctcacagaaagccttatcataaattccataattctaattaatttaccaagataatgtaattacatttggttttgtaaggtatacagcagtaatctcctattttggtgtcagtttttcaataaagttttgattatggcgmaaaaaaaaaaaaaaaaaaaaaaaaaaaaaaaaaaaaaaaaaaaaaaaaaaaaaaaaaaaaaaaaaaaaaaaaagtcgtttcgatgt

SEQ ID NO: 112 - DNA, 585 bp, Homo sapiens
  SITE (526): n equals a,t,g, or c
  SITE (556): n equals a,t,g, or c
  SITE (559): n equals a,t,g, or c
gaaaagccacaattcacaaggaggatatactatttatgagtgttagagcttcagttatctggtttgtcgactttaagtgatattctttggctcctgcctatcccctgtacaacagggagctctttctgctttcctctttctctctccctcctttttcattgtttccgttgtgttacttctgccttgacaaagcacataacatttgctaacaaattatgcarggaaaaatgaatagaacctagaaataacagagaaatttaaaacacctctctctcatccaagactgaagttaaggagacaaaaaatacatataacgatataagtgatctgagtaacagtatctataaagtagatctaatgaatatatgttgaactttctaccttgataatagagaatattactctagggcaagcgtgatggcccacacctgtaatcccagcacttttgggaggctgaaggcaggtggatcgcttgagctttcaaagtcgaggaccagcttgggcaaacatggtgaaaccccatctnttccaaaattagcccgggcatggggcaggnaancctggagcccttaaaaatttatgact

SEQ ID NO: 113 - DNA, 232 bp, Homo sapiens
gcggacgcktgggttggtggccaaggaaaggtatatagtaaaagttgtaaaccatgtcaactgaagtgagtgtaatctcagatatcaacattattatattttaaaatcacgctatggaaatatcacctgaattctgtcatttgtcagatttacagtacctttttttctttaacttttagcattaaataaaaataaaattgggagcactgaaaaaaaaaaaaaaaaaaaaaag

SEQ ID NO: 114 - DNA, 745 bp, Homo sapiens
  SITE (586): n equals a,t,g, or c
  SITE (689): n equals a,t,g, or c
  SITE (726): n equals a,t,g, or c
  SITE (728): n equals a,t,g, or c
  SITE (729): n equals a,t,g, or c
gtccagaaaaaagtggatcatgaattggatgacgtgtttggaaagtctgaccgtcccgctacagtagaagacctgaagaacttcgtattctggaatgtgtattaaaggagacctttcgcctttttcctctgtttcctttatttgcccgtagtgttagtgaagattgtgaagtggcaggttacagagttctaaaaggcactgaagccgtcatcattccctatgcattgcacagagatccgagatacttccccaaccccgaggagttccagcctgagcggttcttccccgagaatgcacaagggcgccatccatatgcctacgtgcccttctctgctggccccaggaactgtataggtcaaaagtttgctgtgatggaagaaaagaccattctttcgtgcatcctgaggcacttttggatagaatccaaccagaaaagagaagagcttggtctagaaggacagttgattcttcgtccaagtaatggcatctggatcaagttgaagaggagaaatgcagatgaacgctaactatattattgggttgtgcctttatcatgagaaaggtctttattttaagagatccttgncatttacaatttacagatcatgagttcaatatgcttgaatcccctagacctaatttttccttgatcccactgatcttgacatcaagtctaacaaagaaaaagntttgagttttggattttcttttttcttttttctttantnnttttttttgaaaccgg

SEQ ID NO: 115 - DNA, 336 bp, Homo sapiens
cgggttcaggtcataggacgtgktatcaggatttttagtagtagtagcattatttggttctaaaacatgagaccatagaaagactagtctgacagtattcttaatgcagtgcacctttttaaattagcatttggagttgtatattgagacacaagatgtcaggcaatggtatgctggagccaggtattgcgagtgcaatagcaatagcaagttgttaaatttcagttttgtgaaccgggagtatttacaccatggaatttagcacattctacacaccaggcagggctttcctctctcagcaagaactctccccacacccatctacctttttttggt

SEQ ID NO: 116 - DNA, 136 bp, Homo sapiens
gcttatcatttgtattaaaatatggtttaatgtaaagagttgcctttctccattcccccctcccctcccctcccctcctctcccctcctctcttacccccaattaaaaaatagcacatccctaatgtgggaaacag

SEQ ID NO: 117 - DNA, 745 bp, Homo sapiens
  SITE (49): n equals a,t,g, or c
ggtacgcctgcaggtaccggtccggaattcccgggtcgacccacgcgtncggtttgttttatatctgtctataagacagtgacagttgtagaaacttcacattaagatgtaccttccattatcatagctatttgtttaaatgaaaaggagaataattttttcaaagtacgtgtaattaagaattttagggaggctgtcaactttcattggagaaaaaagatgatgaaaaattacattacagaaaagttgctgstagatmcaytaattggkgcttcctgkggwagaggtgcttttccctctgaaatagtttttcaaggatgaagctagaggtggtaggtcctgaaggattctctagataaggatgggcattttctgctgtttggcatggggaaaagggtctctcctgcattatagaggtggacaagaatataccgaaactattaccagaagtattcatttttttgtcatggcttttcagagaatttatgcttcagagactagttctgaaaactagttccttccatggaggaagattgtattggacttgaggaattgttgactttttcagttggctttttatgagtatatttgaataaacctgaatgtccatgacatacctacttagaggttatagctatagtttgaagtggatctctattttgtctggaaaaactatatatgtttcaaaaatatatttccatttgcctcttttttggcatgttaatgaccaagaaccaaaaaaaaa

SEQ ID NO: 118 - DNA, 535 bp, Homo sapiens
  SITE (469): n equals a,t,g, or c
  SITE (488): n equals a,t,g, or c
  SITE (525): n equals a,t,g, or c
  SITE (532): n equals a,t,g, or c
ggagcattcttcctttgtcaaatccaatgagactccgagtgctgggattatctttgctgctttatctgtgggtgccaacgccaccgtagatggcatttgcccattgcaaggctttatcagtgttagacactgctgtaggagacaggaagcagttccagggctaatggcaatgaaacgagggtcagtatttctttttcacccactgttgctttgggtgggttttatcacttgtgtttattttattattactgagtgatagggaggggagcaaataagagagttgatgctttgcttccgaaatctatggagcctcagcattgtattgaaatgtcactccccgctgtgtttcatgagcctccagcgctttgttcctcggcagtgctgatcattacttctgcaaccataaattttgcctcctcttctacaactattttatgtcagggaagatgaagtgaccctctatttcttngacatttccccttttcacnttcctatgaattaaaaatcatcttggggctttgccangggtttnata

SEQ ID NO: 119 - DNA, 419 bp, Homo sapiens
  SITE (249): n equals a,t,g, or c
  SITE (340): n equals a,t,g, or c
  SITE (374): n equals a,t,g, or c
  SITE (392): n equals a,t,g, or c
gctgaaaacgggctcggacccccgctgcagcgtggactccggtgtggccgcggggcgtgcaacccggaccctggccagctccgtgtcctccagacctttactcatggccccgcatcgccaggccgagctgcaccttcggtccccgcccgcggcagccgaggagaggagagcaaggcccagaccggggaggaacccacacagcctctgtgctccagcctgcttgaaagacaaggtctacctacaacgcanagatgcacacattaaggacaatgaaacacccaagtgttaggaaccagaataatcagccctaatagaggggaggctgatcagggagggcctnctggaggaggaggcacaacatcagggtgcactgngatttctggagacccaangagttctggtaaatgacaggtgagaaa

SEQ ID NO: 120 - DNA, 413 bp, Homo sapiens
  SITE (390): n equals a,t,g, or c
  SITE (407): n equals a,t,g, or c
ggctgtcactgcttcctttactgtgtgcatgaattccactgkctttcccatgctggcattgggccatggtgccataaagatgatgaaaatgttaggaagacaccctttgtctcaagagtaaatccaccatttttgtcctcattctcagcaggtccctgtgttctaagcttaattttctaagctgccctcggaattaaattttatagtgaattagaacatcagcatgtgtgttgcatgtgtttattaagctgaagtaatacttccagaatgccagaattggatactgaacctctttttaatgagttttattagcaaattggaaataagtatggtgaaacttctgagagactttaagaaaaaaaaatgcgaatgkatactctttaagcctantggaatgtttggtaagntttggg

SEQ ID NO: 121 - DNA, 617 bp, Homo sapiens
  SITE (617): n equals a,t,g, or c
gataaaatttggaaactattctgctttacagactccttttactcttaacatgttcaggaaactggatgtggaattggtgcaattctctgactgctttttgtgtcaaattatattgtgataaaaaaacaatgacatactattttccctatcgcaaagaaaagtattttcgtttatactgttttttcctttggaaaattttcaattgtacattttatttcactgatagttgtatttttcacaaggaaaatgttgtggttataattacgtttgatatatctctacaacaccttttgttattttcagtaaatcttagttatatgttgaatttctaatgtgaattctatcttgaggtaaccatttttttcatacagatttgcttcagtgttatccagaatatgcattcagtactagaattagtttagctttataaatagggctgtgttagacactgcagtaattttctaattcataaaayaaacttcttactaaactagcacttgattaacttgttgaggtaaaaatctaactacatttacattttgaagaataaaactgataattagactatttgcagtgttaaacacagcttccttaactcttagaactggaagttgtcn

SEQ ID NO: 122 - DNA, 344 bp, Homo sapiens
  SITE (341): n equals a,t,g, or c
gcagagacccatggttttctaatctatgtgcttgaacattctaaaacgagtccagttctagtaacctaaagtaaatttgttaaccaaaatgataggtaaaaagatctatacatcttaatgaaataaaacattcctgcttttagttattatgtatgtacaccatatatgaataaacagtttccaaaaacttaaaatacaaaatatattttaccaaaaattatactgaatataatttaaccttggggaatccagaatacttaagtattttcacatgaaactacaaatcatagactctgacactttgatttttaaaggmctctgtccataaaagattctactgntta

SEQ ID NO: 123 - DNA, 410 bp, Homo sapiens
  SITE (388): n equals a,t,g, or c
  SITE (397): n equals a,t,g, or c
  SITE (409): n equals a,t,g, or c
  SITE (410): n equals a,t,g, or c
gaatttttgtatttttagtagagatggggtttcaccatgttgcgcaggctggtctcaaactcctgaactcaagtgatctgccctcctgcctctcaaagtgctgggattacaggtgtgagccccactgtgcctggccttatatattattttaggagggaactgacatctttcaagtagttacttctgactatccaagaagtccatatatccggcaatacatattaaatgctctttcacttatcttcttttttgtcactttttaaagktctgkatacatcatataagttctatatgtttgctaagtatttcctagggatttaaacttaacattgctattttcagttttttcttattatgttttttaaactggttataatttatatatagnttattattntattatatattnn

SEQ ID NO: 124 - DNA, 316 bp, Homo sapiens
  SITE (14): n equals a,t,g, or c
  SITE (16): n equals a,t,g, or c
taccggtctttagntnccgggcccgacccacgcgtccggaatgaatgwaaccctgaagtttggaagcaaaaaccataggaagcacaactgtgagtacataattcagttgagagaatggggtaaggcaagactagaaaggtaaattctgctgtcttgtggatcaccatattgaatgggagatttggtgactagacatcaagcattgtactatgtactaagaatataaagatggaaaaaaaaaaaaaaaaaaaaaaaaaaaaaaaaaaaaaaaaaaaaaaaaaaaaaaaaaaaaaaaaaaaaaaaaaaaaaaaaaaaa

SEQ ID NO: 125 - DNA, 266 bp, Homo sapiens
gagagcacaaaaggcagttggtgatctgaaaattgatttccttaaaattgtctagacctgtgtaccccctggaaagtatcaaaccttatactgggttgaggactcttgagttaagggaacagcttatcttctgccttaattggtatcatgtatttatcttttgaagtaaattatttcactttttaattttaccttgaaagttttgagaaactgtataactggctgcttcttttttctttctttttttttttttgtttttttttttt

SEQ ID NO: 126 - DNA, 501 bp, Homo sapiens
  SITE (242): n equals a,t,g, or c
gcaaagaaacactggacttaacctgtgctatagactaaatagacctaacagacatttacagaacatgcatccaaaaaccgcagaatacacattcttctcctcagcagcacatggaacattctcaaggatagaccatattttaggccataaacaaggcttaaagattcaaaaaaatttaattatgtctagtgttttttactgactaaaacggaataaaactagaaattaacgacaggaagaantctgggaaactataaaaacacatagaaattaaacaatatactcctgaacaatgattgggtaaaaggtgatattaagaagaaaattttaaaagctcttgcaaaaaatgaaaatggaaatatcacataaaaaaacctatgcaaaagctgtaccaaaagggaaacatacagcaatgcccacatcaaaaaagtagaaaaattttaaataaactactgatgcatcttaaagacatataccagaaagagcaaacgaagctcaaaa

SEQ ID NO: 127 - DNA, 451 bp, Homo sapiens
  SITE (342): n equals a,t,g, or c
  SITE (445): n equals a,t,g, or c
  SITE (450): n equals a,t,g, or c
  SITE (451): n equals a,t,g, or c
gcagcggtggactgtattcgagtgagaatgccggaatgagtagcgagaattatgtgggaatcataatggccgaaaatctaaggtttcttggggaaggttcgtccgcccaaggtaagccgggagctaaggcgaggccgcgaggcgtagtcgatgcacatacggtagaaattccgtagccgccgaactttaagcatgctgacactttggaataggggaaccccggcgttggttgaccggggcgtaagggaccgaaatatagtagggaagtctccgatgtccagaggcgagaaaaggcatgaggaatactaaggcgcccgtaccgcaaaccgacacaggtagatnaggagagaatcctaaggccaacgggagaagggttgttaaaaacaaataaatcaaaaataatgataaaaaacaaatggtataatataaacagaaagaaaataanataann

SEQ ID NO: 128 - DNA, 592 bp, Homo sapiens
  SITE (427): n equals a,t,g, or c
  SITE (559): n equals a,t,g, or c
  SITE (563): n equals a,t,g, or c
  SITE (566): n equals a,t,g, or c
  SITE (592): n equals a,t,g, or c
ggggaaaattacagatgtcctaaaaaggcaactgcatttgacttggattgtttatactgagcctgatcacaaacctcctgaagagaaagctgtgctgaattaagctgatgattgcctagatacagtctaagctggcaatcaaacattgtccatcatagactgtgctaaaatctttcacttgtgtaaacttgcagtaaaactttataagtccctccctaacctcatctgaatggaacatgatatagcttcttgctaaatttgtgtctcccaaatagcaatttataaaaaatcatgattaaaatgccttttattttattttccacagggtctgttttactcccatgktataaaatgcttttctcaagaaagcatagagcccattctcttctctagagagaatcgcagccttgcaaaagagacaactaanaatacatacatataagtagcaagaatttaaaactcaaaatattaaatatgttacaaaagtatacaagcaatagaataaataggatgaatagcaaaatggataaaatcaactgtgagttgaaagcctgaaagntcangtnaaggtgttgaaaagcttcagaaaaan

SEQ ID NO: 129 - DNA, 374 bp, Homo sapiens
  SITE (281): n equals a,t,g, or c
  SITE (344): n equals a,t,g, or c
  SITE (353): n equals a,t,g, or c
gaaattttgtatattttgtatagatagagtttcgccatgttggccaggctggtctcgaactactgacctcaagcaatcctcccaccttggcatcccaaagtgctgggattacaggcatgagccactgtgcccggccagctatagcaacttttaatgttctccctgtaccaccaaagctttacatgtgctgtttcttgtagttggcatgtcctttccttacttctgcccttcagcctccatcaagattttgcttatgtgaaatactttttttcttttctttntttcttttttttcaagcaattctcctgctcagcttccgagtagctgggactacaggcgcctgncaccacgcntgcctaatttttggaaaatac

SEQ ID NO: 130 - DNA, 346 bp, Homo sapiens
  SITE (281): n equals a,t,g, or c
  SITE (308): n equals a,t,g, or c
  SITE (339): n equals a,t,g, or c
gttctacatcaaatgtttgccagaattcacagtttagccatctaaatttttttatatagaaagtgctttttttcttttctttcttttctttttttttttttttttttaagatggactccacgttgccaaggctggtaatttgtttcctcttgatcaatataaagacgtttcaacattattgatctctttagagtttggttttattattttttcccgtttgktttatatttcattggtttctgttcgttattaatctttttctacctatttggggtttaatntgatcattttcctcctactttctaaangtgggatgttaaatagctgattttaccacanattttga

SEQ ID NO: 131 - DNA, 361 bp, Homo sapiens
  SITE (292): n equals a,t,g, or c
  SITE (294): n equals a,t,g, or c
  SITE (328): n equals a,t,g, or c
gggaaaggaaatgaaggttcccttttccctaatgcctatattgctcaggccagcactcctgaagatgcttgttctgttgaagctccataatgtgtcgatgaccctctttgcatctgaggctgggttaatccccagaggtacaaagacaagtcagggatggcatctgtcttggagatgaggttatcctgaaggggatgtggacattggcacaggggatgccagtatcaaatgattggtgttgaacagggagctgggagatcatagaaaacagcctcttccctcatgtgagaanangggaggttagggcaagacttcctggagaagtcgnctagacggagtcttgaacaatgggtagtactta

SEQ ID NO: 132 - DNA, 584 bp, Homo sapiens
  SITE (494): n equals a,t,g, or c
  SITE (540): n equals a,t,g, or c
  SITE (573): n equals a,t,g, or c
aggaccggtccggaattcccgggtcgacccacgcgtccggatgaaagaagctgggcactgtggcttgagcctataatctcagctactcaggagggtgaggtgagaggatcacttgagtccaggagttccaggccagcctgggcaaaatagaccccatcttaaaagaaaatgtaaaaaactttttttaaaaatgaaagaaatgaaaaatagtgaaatctataggaagttttcaaagttccatttggagataaatttattttcaggccttcattacatagcacattactgtataagagattagaattctgctcaatagaaggcagggaggagccaagaagatggaaaacaaacataagaattgrtactggtgaaacagtaaaatagcatcaccatgggtggttctaatagtttaaaataaagataatcctctctagcatagatacctacttaaggggggaaaatcacaaataaatttagaaattagaagagatacngaagagaattttatttataggagactttcatatataagcaattggntgcaaccaaaagtattcaaactggcttacgtanaaaaataatta

SEQ ID NO: 133 - DNA, 425 bp, Homo sapiens
  SITE (366): n equals a,t,g, or c
  SITE (373): n equals a,t,g, or c
  SITE (386): n equals a,t,g, or c
tgctacgtgagttcaccaaggccaccaacgtccgcctgcgcttcctgcgtaccaacacgctgctgggccatctcatggggaaggcgctgcgggaccccacggtcacccgccggtattattacagcatcaaggatatcagcatcggaggccgctgtgtctgccacggccacgcggatgcctgcgatgccaaagaccccacggacccgttcaggctgsagtgmacctgccagacaacacctgcgggggcacctgcgaccgcttgctgccccggcttcaatcagcagccgtggaagcctgcgactgccaacagtgccaacgagtgccagtcctgtaactgctacggccatgccaccgactgttactacnacccttnaggtggaccggcnccgcgccagccagagcctggatggcacctatcaaggtgg

SEQ ID NO: 134 - DNA, 629 bp, Homo sapiens
  SITE (486): n equals a,t,g, or c
  SITE (560): n equals a,t,g, or c
  SITE (577): n equals a,t,g, or c
  SITE (628): n equals a,t,g, or c
  SITE (629): n equals a,t,g, or c
ggagattgtgtttacccagaagatgttcaatgatagtgtgttactaaaaaaatatgggaatgggagaagtttttctttgctgcacccctgtttttacaccacactccactgagaaaggaagctgaaaagcattgaatttgctgttttttaagaaagtaactaagcaaccactaggatataacattttgtattttaatcgtcagcttacatagctatcttcgcatgagagctgcagcacagcgtagtggctaatggtaccctagtgttcgtgtggattcaaagcctgactccattacctacttcttggctgtgtacctttgggcaaattatttaacctatcttagtttcctatctgaaaaatggggaaggagtcttacccattatcttaggtacttttattaaagttacaagaaaattaaatgatataatatctgtaaagcaatgagaacagactctgacatctaataaacaataaatgtatgttgnttggtattttatgagcagactgaaaactcactgaaatgaatcatagttttttggtttggtttggtttggttcgnttttggttttgagacangctttttcaacctgggcgacagaaccgaggattccgtcttaaaaaaaaaann

SEQ ID NO: 135 - DNA, 526 bp, Homo sapiens
gccctatgcaacaatggctgcaaagcctgccattccaatgggacaaatggtgcctctttagctttctgaagaagtttggatccctgatcttcatcatgtgaaaaatgggaaacctctgtgtctattgacatagtgattggttgaagaatctccctagagtgagaaaacctcttacacgccaaccagcttctgatccctcccgtgcaccccaggcgggtgtttctaagacctgggggatgcgcaggagagaggcttcagagaagctgagcttccagaaccttgtcacaggatcttcggttccgagggcctttagaacccaagagttgtagagtcctcacattttaaaaagatttttttttcctgatgacgaaaataacatctgactgggatagaaactttgtaacataaaatggaaagagaaaatttctcataattttgccacttggaattaactactattgacattttggtaaatttgkttccatttttaaaaaagcaaaaaaaaaaaaaaaaaaaaaaaaaaaaa

SEQ ID NO: 136 - DNA, 756 bp, Homo sapiens
  SITE (621): n equals a,t,g, or c
  SITE (653): n equals a,t,g, or c
  SITE (721): n equals a,t,g, or c
  SITE (747): n equals a,t,g, or c
  SITE (751): n equals a,t,g, or c
gccccttcccatatctggggccttcgtattctgccatgggtggacataggtaaccctgaaggcccctgccagttctgacagtagcattctatgatgggagttggggagatctgggtccctagcgctagggtccctctgtcttaataagagggctctgggcatcccactctcaagtccacccaactcttgccccctacctgccaggccccgacccttgaaggcccctctccgtgccccatcactgcaaccgccctgaccctcctctcggccatagcccctctctccatctgctctgccctaccctaccctcctatctggagggcctctttgaggtccctgcatgacgctgggcaagggacttgttcagagtctcatttctgtgtcactgagaggagagagtggggctggggagagacttaagggatatctcagaggcaggaagggcccctgtgcccaggtggccaccataccagcctcgcccactctgatcattcccctgagtccctgagcaacacacatgggacagagattcagggagaaaaggtcgtgcaaagccacagggtccatgctgggccaggacgaaagcccttctgagcacctcaaagtaagcctggcgccagnccatctgtccctttcccaggaggcctgatctnctcatgagaagcccttccaacctcagtcaaatcttacccattctcaagacccagttaaaatcaccttntggcaggcgcggtgggttacgcctgnaatnccaga

SEQ ID NO: 137 - DNA, 681 bp, Homo sapiens
  SITE (647): n equals a,t,g, or c
  SITE (660): n equals a,t,g, or c
  SITE (668): n equals a,t,g, or c
  SITE (674): n equals a,t,g, or c
  SITE (681): n equals a,t,g, or c
gggagaaagagaaaagacaagactaaaatgagtgtggccatgtatcccatcttactgccttcaagaagtcctttcctgtaaaccttttttttgattgttcttgttgttctggtaagggagggcgaactgggtttgattctgagactgccacaagcctgtctctttttttgtgttgtactgactcgatccttgcttcacgctacagatttctcacagtgggtatttttagttgaggaggaggtttctcaaaaatactttgccgatgtctggtcatgcacaacccctgggcatccccagtgaagtgctttgagtcatggccccttaagggcagagaggatgtgcatttggcccatggtgtgctttgcctggacgtgtgtcatttcccaaaatatacaggaggagaaccagattagtaaaaggaaaccttgtcacacatggtagggttctgctgccccagaatcaacctttacagctggaaaggttcagcctttcttacttggaagggtcatattcattgaactgcagttaaaacagtcttaccaatagatagggtagcctcacaccaraaatggggggcaaaaggcagaatcactaaacatttaagcacacatgagtaaaaaatattttgggcctctttttttctttgnttaaaaatatgcnaagggggnccggtncaccggn

SEQ ID NO: 138 - DNA, 738 bp, Homo sapiens
  SITE (283): n equals a,t,g, or c
  SITE (656): n equals a,t,g, or c
  SITE (670): n equals a,t,g, or c
  SITE (674): n equals a,t,g, or c
  SITE (705): n equals a,t,g, or c
  SITE (712): n equals a,t,g, or c
ggcacgatgctggyacgggcaccgtcttcctcttcttcatcgcggtgctgggccacacgcctgaggccgtgcagatcgccacgggaaggaacgccgcgcgcctctgctgtgtggccagccgtgacgccggcctctcgtggggcagcgcccgggacctcaccgaggaggccatcggtggtgccgtgcaggactgggccacattcgctgtgggtcccggccacggcgtgcagctgccctcaggccgsctgctggtacccgsctacacctaccgcgtggaccgccnagagtgttttgcaagatctgccggaccagccctcactccttcgccttctacagcgatgaccacggccgcacctggcgctgtggagccctcgtgcccaacctgcgctcargcgagtgccagctggcggcggtggacggtgggcaggccggcagcttcctctactgcaatgcccggagcccactgggcagccgtgtgcaggcgctcagcactgacsagggcacctccttcctgcccgcaaarcgcgtggcttccctgcccgagactgcctggggctgccagggcaagcatcgtgggcttcccagcccccggccccaacaggccaacgggaatgacagtttggtcaagtggggcccccgggaggtccccttcaggncttccaattccttngggnccctggaagttccaacggaaacccccccaanagggaanggcttgctttgtaaagaacccccccc

SEQ ID NO: 139 - DNA, 355 bp, Homo sapiens
gccttatcctatcctccaaccatttcccgaaggacaagagccatggggctaacccctgacatagactgccatcattttaccagggacattggattgacaaggtttctagttgttgataagcgcagacattctgctatctgcctccttggtagcctgccaactattcatgtgcttcttggaaaaggaaacttttccaaaaggcagggacttcagagggctggtgagacagtgtcctgtcattaaagcttcactagagattggcattcccaatattagcatcatgktgctatatgctataaaggagacaaagtactatcttttctttacccattgtaagyttcactgggacccctgt

SEQ ID NO: 140 - DNA, 504 bp, Homo sapiens
gaacaaaccatccactcagcagctgcgggcctttcccgacccctttctcagctcccctcccctcccctccgagctctgagaatgccatggccctgtcacatggaatcattaaccctggagtctcctgatggaaccgcctcagccagcccactgtcctcctccttcatgactcagttcaaacatcaccttccacatgaggagcctccagcttctgcgggcagaggggcactcacccaactgtgactacagcacttacacaagccaccaactggcacccacagcacttatcactccatgtgtctgctcaaccagcctgggtaaggaaccctaccctctctgtctctgtccacctccaacaggccatggtgcaccctgcatgggggctgcctcatgggggtctccaggaacacctgctgagtgaatgcataaagagtccttggctgctgcacactgagctcacagttaactaaatgctagaagattttgtaaaaaaaaaaaaaaaag

SEQ ID NO: 141 - DNA, 336 bp, Homo sapiens
  SITE (224): n equals a,t,g, or c
  SITE (291): n equals a,t,g, or c
  SITE (299): n equals a,t,g, or c
gggctatgactatttgttggagaatctgattcaacatagaatgacaaccctaaactgataaatccaggttcaattggtaattaactttgagcttataaattggwtgatgatgattatcagaccccagcttttgagttagtagaaccaccttgctaagcttaagatctgtaagtgaggaactcggtatttcctggggctcttcacagctttaggttagtatctgntgtcttagaccgaaatagccttgctatcatagctaaggaacactttggttacaaaattgcacttggntggtaagnatggataggttttttttttttttttaattaacctagc

SEQ ID NO: 142 - DNA, 400 bp, Homo sapiens
  SITE (398): n equals a,t,g, or c
gattgttaataagatcctgtgtcacttgataatgatagcttaataccggcttttaaagaagtcatgtaaattagcttgtgctgcctattattatgtctaagaaaatggttttatggctgggcaaggtggttcacgcctgtaatcccagcaacttgagtggctgaggcagatggatcacctgaggtcaggagtttgagaccagtctggccaacatggggaaatctcatctctgctaaaaatacaaaaattggctgggcatggtggtatgtgcctgtaatcccagttactagggaggctgatgcaggagaattgcttgaacccgggaggcggaggttgtagtgagctgagatcataccattgcacaacagcctgggcgacagagtgatactctatctcanaa

SEQ ID NO: 143 - DNA, 118 bp, Homo sapiens
ggcgatgtccaataaatttttggtgaattaacggatgagtgactggatggattctgatataattgagacttatttgtgactcggtggtgaacttaatatagaacttcttttttttttt

SEQ ID NO: 144 - DNA, 672 bp, Homo sapiens
  SITE (501): n equals a,t,g, or c
  SITE (576): n equals a,t,g, or c
  SITE (645): n equals a,t,g, or c
  SITE (648): n equals a,t,g, or c
  SITE (651): n equals a,t,g, or c
  SITE (655): n equals a,t,g, or c
aaacaagagagaggctctatgcccgcaaggtctcacctggatggactgccagctggcaggcaccgacggagcagcagccacctttgcttgtcttctcgtgatcatgtacggcgccagcgtggtgctggccctgcgtagctaccgagaacagaagcgctacaaaggcagccgagaacagcccggaagttacagtgatgcaccggaatatctgtggtctggaactctttgagatcttccggaacctaaatgtgaacgcacattgtttctctcaaaaagacagatcttttaaaactccgcattagacaactatggttttcacacacttgactttataaatgctctctttggactgaggcaaagttaaagaattgaggacgggcatggtggctcatgcctgtaatcccagcactttgggaggctgaggtgggcggatcgcttgaggtcagcagattgagtccagcctggctcacatagcgaaaccctgtctctactaaaaatacnaaaaatcgccgggcatggtggctcacgcctgtaatcccagcactttaggaggccaaggcaggcagatcacctgangtcaggtgtttgaaaaccagtctggcaaacatggtgaaacccccatctctactaaaaaaaaaaaaaaanggncgnccgnttttaaaggatcccaag

SEQ ID NO: 145 - DNA, 527 bp, Homo sapiens
  SITE (441): n equals a,t,g, or c
gcccggccagccgctcaacaactaccacatgaagacgctgctgctgtacgagtgcgagaaacacccacgagaaacggactgggacgagtcgtgcctgggcgaccggctcaacggcatcctgctgcagctcatctcctgcctgcagtgccgscgctgccctcactactttctgcccaacctcgacctctttcagggcaagccccattcggccctggagagcgctgccaagcagacctggaggttggccagggaaattctcaccaatcccaaaagcctggacaaactatagggtgctggggactgcttgaaaagcgacacaaacgggcgtgctctctcagacacacaactcagctataaacagcagaaactctggacacaaacttttatgtaagtcacctgaaataggaatccggcagaagamcttcattaattaagaagcanacaaaaagagagcaacccaaccmaaacaaatcacattcttgacaaaagkgawcgtttctttcaacatgggaatttaaaaggcacac

SEQ ID NO: 146 - DNA, 247 bp, Homo sapiens
  SITE (244): n equals a,t,g, or c
ggtgcgccccagcctgcggggccgcccttcagggcgcgcaaggggcgagtctgtccagccggcagcaccccaggccggatggacgcttgttcctggttctgtgccccgtgagcgctcaacgccctgcctgatcctgcctgaagatggtgccactggtggctgtggtatcagggccccgtgcccagctctttgcctgcctgctcaggctgggcactcagcaggtcggcccccttcagctgcacancgg

SEQ ID NO: 147 - DNA, 254 bp, Homo sapiens
  SITE (243): n equals a,t,g, or c
  SITE (254): n equals a,t,g, or c
gctccagcccccgacctgccttcctagcctctcattctgttattgcatctgacaaacacagcccaatactcaatccagtctgagttgctgcgcaattccttaacgctctaggcttctgggcttcctctggttgcattcctaaacataactgacaaacttctccccatccttcaagggccaacttaaatggcacaccaattaaaccttttcagaattcccggaaaaaaaaaaaaaaaaaaaaanaaaaaaaaaan

SEQ ID NO: 148 - DNA, 782 bp, Homo sapiens
  SITE (663): n equals a,t,g, or c
  SITE (725): n equals a,t,g, or c
  SITE (744): n equals a,t,g, or c
  SITE (756): n equals a,t,g, or c
  SITE (757): n equals a,t,g, or c
ctcctaactccatctcagcctaaaattggcacaattggtaccagtggcccacgaacgtaggtggtaagacagcatttgcaggctgagtgactcactgtctggctggctcggaggcccccatccctggtggataggtggcacagacagtccctggcacaagaaggctgtccagtgatgaagacttcagatgaaatggcatgctggtgcaggggaacgcaatgactggtgggtgatttgggtgtctcaaatatgggaagggtggataaaagagacaaggacagtgggcttccatggttattgctgagttggattgacgtcctgcaagtggataatgaaaagctgaggtcaattaacaaacaaaactaagtgtgagccgcagagtctctgtggtagcttgccaacaatcctcatctcatgctgtagccaagcaragcaagctkaaggccmagcmcaggatttgatggtaaaagtagctaacagccaacaaatactcawccaagccaggctgttagatcaaggttggaatcaaacttgggatcccaaacatgggatgggarcatttartggatctccccaaccatctgcctcctagaaaactycctgaatattcacatccttcagaagaagsccacccttcccatgaagagytggaactaccctccnttctgcctttccttacacaaggaaaacagtgccaagtctttcccatgaacaaaggtgccttnagatggccttcctttctgntccaggcttacnnattagcaacaactgttgggtggggg

SEQ ID NO: 149 - DNA, 617 bp, Homo sapiens
  SITE (587): n equals a,t,g, or c
  SITE (589): n equals a,t,g, or c
  SITE (614): n equals a,t,g, or c
ttgtgctgcgttgctttatctcgttctttatctcgttccctaccacaccggcgccgctgacgggtgtgaacttagttacscttagttgtcgtctgctactcatatatctgtgtcttcttcttgcatgcactacagcatttggtcgcctatttgtaacccttataatcctgcccgaatttacagtctgatgattttctacggtttccatagcagttgtgttcttgtgtcacagaacattagyagtagcgccaaatgcrttcccagcacattatgagccaaggttatackcgctgtgctccccgtatgttatgggcggacgcagcgccggagtgttgtacagccttacgggctttgtgtacctgttgcccagccaatttgctcttgtgcccagtgtataatccctattattatcacctcagggcgcccttagattaaccagcgctgcacgcgccttggtgttgtgcataattcctacaggcgtgtgccagtgtcacagaaaattagkaactgagccaagatttgcccgcgcctaaagatatgcgttaccagcacacttatgtaaacgcccgcstggcccgttctggtgncnttaatactactaatttgagtagtcntgt

SEQ ID NO: 150 - DNA, 408 bp, Homo sapiens
  SITE (300): n equals a,t,g, or c
  SITE (392): n equals a,t,g, or c
ggatttttgaataatcctagggcagactaaattcagacgacccatctcagaatggtggatcaaagcagcaagtcaatttgccttgtatgcaacttatgaggattagtagaagagagtgggtccagatttctggtggtttctgccctgcagatgtctaacacataagccaggacattctgctgtgagtgacttattgtacccaactctatttctctccatactgaaacatgtctttcataggtgatacaactttttaaaatgtatgtgtagatataacttaaatatggagctttcaaaaancacaaataggctggacatggtggctcatgcctgtaatcccagtactttgggaagctgaagtgggcaaatcaccttaagtcaagaattcccanaccagcctggccaaca

SEQ ID NO: 151 - DNA, 51 bp, Homo sapiens
gatgttctaccttttttcagatgagaaaactaaggcaaaaaaaaaaaaaag

SEQ ID NO: 152 - DNA, 317 bp, Homo sapiens
ccaaaaaaaaaaaaaaaagtagatttcagataatyyactgttcagcaacaggacacacctccctaaatgccttgtaatatatttgaatctgattctgcatttcttcctcaatttatgtaatgaaaataaaattaatatatcatctaacagtagcacaaaatttgtaatatgaagtaaagtatgaagataatgaagaagttgttttctttgttgaagcagttatatgggtctttctcagtatatttctcttttctctaaaagtttaaacttattaaaagaatgttatttttaacctttcaaaaaaaaaagaaaaaaaa

SEQ ID NO: 153 - DNA, 742 bp, Homo sapiens
  SITE (458): n equals a,t,g, or c
  SITE (488): n equals a,t,g, or c
  SITE (635): n equals a,t,g, or c
  SITE (724): n equals a,t,g, or c
gctcgacgttgcacagacagatggagcagtaccgagaccagccccagcacttggagaagattgcctaccagcagaagttgctgcaggaggaccttgtccatatccgagctgagctctccagagagtccactgagatggaaaatgcttggaacgaatacctgaagttggagaatgatgtggaacagctgaagcagaccctgcaggagcaacacagaagagccttttttttccaggagaaatcgcagatacagaaagatctatggagaattgaagatgtcactgcaggcctgagtgcaaataaagagaacttcagaattctagtggagtcagtaaaaaatccggagagaaaaacggtgcctttgtttcctcacccgcctgtgccttcactctcaacttctgagagcaagccgcccccacagcccagtcctcccaccagccctgtgcggacccctctggangttcgactcttccccagctgcaaacctacntgccgtaccgacctcacccaccccagctgaggaaagtgacatccccccttcagtcaccaactaaggcgaccaagagttcaggaagatgaagcacctcccaggcccccactccccgaactctacagcccagaggaccagcccccggcnttgccctctctgccaagagaggccaccatcatccggcacacatctgtgcggggcctcaagcggcagtcagacgagaggaagcgagaccnggagctggggtagtgtgt

SEQ ID NO: 154 - DNA, 459 bp, Homo sapiens
  SITE (346): n equals a,t,g, or c
  SITE (363): n equals a,t,g, or c
  SITE (393): n equals a,t,g, or c
  SITE (395): n equals a,t,g, or c
ctcccggctgtcatcatcaaattttcaagtgaagatagtctgttgaagattgaacaatgaccttgaaagacagctgagttgctgtgggtataatgtaaagctggtgaagtttggccagtttgggcttcagaagtctaagtctagtgaaagtaccctgacccccatataaacaacccttgaggccggtgtggtggctcacggctgtaatcctggcactttgggaggccgaggtgggcggatcacggggtcaagagatcgagatcaccctggcccacatggtgagaccccaactctactaaaaatacaaaaattagctgggtgtggtggcatgtgcctgtagtcttanctacttgagaggctgangcaggagaatcgcttgaacctgggaggcanangttgcagtgagctgagatcatgccactgtgcttcaacctggtggcacattgaagacttcacctt

SEQ ID NO: 155 - DNA, 465 bp, Homo sapiens
ggcctccatctccaggtccctctccgaggcttcctcgctgccagctgagtcgtgggcacctgagggactacctaccactgctcccggctgtgccatcgccaccagctcccagcctcctgctcagacccgggacagcccctccatggcccccgagatggaccagttctacaggtccaccatggccatctacaagagcatcatggagcagtttaaccccgccctggagaacctggtgtacctgggcaacaactacctgcgtgccttccacgctctgtccgaggcggycgasgtctacttcagtgccatccagaagattggggagcgtgccctgcagagccccacctcacagattctgggggagatcttggtgcagatgtctgacacccagcggcacttgaactctgacctggaggtggtggtgcagacattccatggaggcctgctgcagcacatggagaagaacac

SEQ ID NO: 156 - DNA, 432 bp, Homo sapiens
  SITE (22): n equals a,t,g, or c
  SITE (373): n equals a,t,g, or c
gtacggtaagcttggatcctcnaaaacgggccggccttttttttttttttttactgkgaaaaagatttattagtctgtacaagttggktttgatgaactactggttacttgttaagtaaattgkcaagattttcattgkgacagtattttccctcacacatcaraatctggaagcaatatgcctttttcaaattatcacttagkgttttttttccccacccctcaaaacacagaaataggtttttgaatatcaactagccattatggaagccgkaagatacagatattcatcaacattacacaagctacagttaaggkmcctggacaaacactaccaacatwtatgaaaaaagaggttggttttaaaagtgtntgaggagttacaataaacacactattcatgtcctcctgaaaccaaaatgggggaaaacc

SEQ ID NO: 157 - DNA, 508 bp, Homo sapiens
  SITE (1): n equals a,t,g, or c
  SITE (455): n equals a,t,g, or c
  SITE (477): n equals a,t,g, or c
  SITE (484): n equals a,t,g, or c
  SITE (491): n equals a,t,g, or c
ncgcctgcaggtaccggtccggaattcccgggtcgacccacgcgtccgattttcttgatgtgcagacactcctcccacatagcagtgctccctgctctggctttactgttgcttcctttcatgctgggggtaaagcctgaggccctgtgggcagaggcagcacatgcgggtacccgtgtgctgtacagcatcacctggtcagcccggggaccttggcccactctcctacttacacttgaaaatacaaactttcacaaaggttaagtgagttcttcaaagttatctgaaagktaatgkcatggccacaggtggagccaggtctcctatctyctcacctctcagtgataaaggataggtttttaggccgggaacagtgctcacgcctgtaatcctagcactttaggaggctgaggtgggtggatcacttgaagtcaggagtttgagaccagactggncaacatggtaaaatcctgactntactaanaaaaaanaaaaaaagggcgggccg

SEQ ID NO: 158 - DNA, 177 bp, Homo sapiens
  SITE (149): n equals a,t,g, or c
ggtttcaccatgttggtcaggctggtctcaacctcctgacctcaagtgatctgcccgcctcagcctcccaaagtgctgggatgataggcgtgagccaccacacccggccaagcacaggcttttgaatggtctccctctccccagcccangtacatgaggccaaggtgaactgtgcat

SEQ ID NO: 159 - DNA, 812 bp, Homo sapiens
  SITE (14): n equals a,t,g, or c
  SITE (24): n equals a,t,g, or c
  SITE (26): n equals a,t,g, or c
  SITE (40): n equals a,t,g, or c
  SITE (778): n equals a,t,g, or c
aacgggagacctantatagggaangntggccgcctgcccntaccggtccggaattcccgggtcgacccacgcgtccgaattctcctgcctcagcctcctgagtagctgcgattacaggtgtgcgccaccatgcccagctaatttttttgtacttttagtagagacagggtttcaccatattggccaggctggtctccaacccctgacttcgtgatctgcccacctcagcctcccaaagtgctgggattacaggcatgagccaccgtgcccagcccaaggttatatcttttttattccacttagtgcaaatattcatccgtatattttgtgccagaaatagtactatgttttgctattggatgctgctactcagtccccttggggttaataccatagtatattcctttcattatcttcctaaaataggaaaaattctgaaatacatcttgcatcaagctttttggataaaggattgacagcttgaattattcctgktttacatatgagaaaactcaaggtgaaatgatttgcccagatctttgaacctaggactatttgccttcaagtcaaatccgaagaatggtcaacatataggtggaatattttaattcagataagctgttaaaaatagaatctgcctagactatgtcaaaatggtcaagcttggtggaaaaaatataccacttggtgggatggtatatatactgatagcaagttcaaaaatggccagtaagtgattggctgaattaataagcttggaatcaattggtaaaaaggntattaggcagatgaattaaatcttgaaacttggt

SEQ ID NO: 160 - DNA, 534 bp, Homo sapiens
acagtctcctcgtgtatctccagagactgcatgtgcaaagtaaaatgcttcatttgccacatagttgttgtaatatttaatccagtagcataacttatatctgtatttaaggacttttgkgcaatatggtcttaagaaataattgccaaaaaaatcggccatggtttgcattttttaacataatctaagacagaaaaaaagcaatttttactatgtaacaatggtattcaacattctatatactgtgtttagtacactaattttgaagccaatatttctgtacatgaaaaagagctatttatctctgtttgttggaaaatcctaatggggattcctctggktgktcactgccaaaactgtggcattttcattacaggagagtttactatgctaaaagcaaaaaacaaaaaaaaraaaaaagggaagaaggaaaaaagcacaaaacaatttgaagatatcctatctcaatgacaaatcaaaagagtgatattgcttttaactgtaatagaagaaaatgaatttatgtatatatca

SEQ ID NO: 161 - DNA, 574 bp, Homo sapiens
ccacgcgtccgcccacgcgtccggtttgaattattattcctgacattgacaacttacagtttgtaatactgaagtgttacttaggaaaacaaatgggcatgcagattttgatgtaattgcaactgtatgtgtctgttgtgaaagccaccagcagaattggatggttgactgtagtatcggggtgtccagtcacccatctcaaaacccagagtattacatgtctagcttaattgttaggttttaagacaaaaggaactgaggctcatcagarcagaacaacaggtagtccctaggaagtcacgtgggaatgarcttgaataagtttgktaccttgktggttggcagatgtacttggagtgtgtatcttaagcttttgttttttcacgggcatctttctgttttgagcaaaggcggcttcaatgatccatcctaaagaggtgccccctgaggccatcttgctggcagtctaccttgaactgcagaatggtgagtaattctctctgtttaggactttatcccttgaaagagcctgagattttttggttgggcaacagagcgaggctccatctcaaaa

SEQ ID NO: 162 - DNA, 514 bp, Homo sapiens
cgggtgacgccatgggtggggcggagcgtctgggatgcgctgggagcctaggatccccgacagttttgcagaacactgaaatctatggactctaaaatggacttcatttaaagaaacccacggaccattaatggacaaaaacatgagtcaatatgtattgtggcattcaaatcctagcactctgggagagcatcaagtaccacgtttttgaagaccatggcctatcatcattatgcattcaagatttgagtttgaataacctcatcaagacttagatcttcttcagaagcttcaagtctcatctgcattaaagctctccattgaaccctctcacaaaagtacaagcttaaaggggctaaaatccattaatacattccattttatatcccttcctctgacttctcttcaatttccttggcctctagggtccttcatattgcttacgttcctttagactagagccaaggagacagtgctttccaaaaaaaaaaaaaaaaaaaaaaaaaagtcgtat

SEQ ID NO: 163 - DNA, 515 bp, Homo sapiens
gcacttctgccaaggccagggccagcaggacggcaggactctagggaggggtgtggcctgcagctcattcccagccagggcaactgcctgacgttgcacgatttcagcttcattcctctgatagaacaaagcgaaatgcaggtccaccagggagggagacacacaagccttttctgcaggcaggagtttcagaccctatcctgagaatggggtttgaaaggaaggygagggctgtggcccctggacgggtacaataacacactgtactgatgtcacaactttgcaagctctgccttgggttcasccatctgggctcaaattccagcctcaccactcacaagctgtgtgacttcaaacaaatgaaatcagtgcccagaacctcggtttcctcatctgtaatgtggggatcataacacctacctcatggagttgtggtgaagatgaaatgaagtcatgtctttaaagtgcttaatagtgcctggtaccatgcagtgcccaataaacggtagctattt

SEQ ID NO: 164 - DNA, 454 bp, Homo sapiens
  SITE (4): n equals a,t,g, or c
  SITE (38): n equals a,t,g, or c
  SITE (57): n equals a,t,g, or c
tggntttcatcttatttataaagtaaatcacctggaanttcaaggatggggcgggtngcggggagaacaccgtgctgccagtcacccagacctgrcagccggctagccccactgcccgttccttttacgcccaagttttgctccttgagagcagattggctgatgcccctgcaaccccagcccaagtctgcctcaaagaccgagtgacataagccattcccaccctcctaggttcacatccagggctgtgtcttccttgggggaggagatggtgtcgtttagatcagggtaaggcagtcaggcgggtgttcaccactgccttttcttcctctgagcgtgagaacactgaacccagccactgcccctgggtccctgtcctggaaatggtctaataaatccttttcccttcttgagctacccaaaaaaaaaaaaaaaaaaaaaaaaaaaaaaaaaa

SEQ ID NO: 165 - DNA, 560 bp, Homo sapiens
gctgagattcttgagcctttcagtcagtgtttgatctggccattcaggaaggcttattataaactaatgtataactttgttcacaatctcgcaaagtttccactgtctgaaaatcctggtgcatgagactcctacatcgttattaatggcatatccttaataaaagtttggcttttgatttttaatgggttttcaggagataacttcccaaagaggcattagatagtttaacagagcctgtcattaatgtgacctgtgagaagacttggctagaggtggtgaaatatctttcctctatccctcccaaagacaagaaaaacctatggatgaggatgaaaatttggcacaagagcaatcattggcggaagttgaatctgaaactgttgacaccaattcaagttaatgctgctagaggctgatcctcaggaagctttcttgactccagaggttattatcataagtgatgatgaagacaattaggaggctgtgggactggaaacaaatacagcaataagaacaggagcaaatttttagaccaggattaaacctccctaagaggt

SEQ ID NO: 166 - DNA, 630 bp, Homo sapiens
  SITE (262): n equals a,t,g, or c
  SITE (317): n equals a,t,g, or c
gggcctttctatcaagtttctgagatccttacttggcaaaataaaaacccggcaatattaggtcagtccccattttatagaacattttattagttcatgaaacaaaaatctaggaaccagttctttggggagtgtcaggaagcggggagggttatgttgggaggaatcacttctgaagagagatgaatagggttgaagatgaagcagtcaagatggttactaagcgttttataaccaggtgttttggtttttaaaaaatcanccatttctgtgcattagagcctgctgctgcctccaggttgtaaacagtgttctancggccagccacagtgaaatccagtgcagggctaccatcctgatagagcgcttggtaccagtgtcccacaccccaatgtaggcattgcccatggggacsagaggggacatagacactccttgggggccttttgtgtaggaaccgtgaccaccagtccagtgtctcagtctgtggtctctcctttaaagtaggaatcyycctaattagctgatcactctcgktcttcctggactccccagtgtctttcagaaatagcttctggtaagttgcagcttgctcatgatgggagggaaggaagaggaagtagaacagta

SEQ ID NO: 167 - DNA, 269 bp, Homo sapiens
  SITE (53): n equals a,t,g, or c
  SITE (258): n equals a,t,g, or c
gatcacaccactgcactccagcctggcaacagagcgagactccatctcaaatnaataaataaataaataaataaataaataaataaataaaaatgtggaatgaattaggcaagttgggctgctaatgccttgccactgaattgracagccacagacaaaccagaatgcacttctcagggcaaaagaacaaatattgatgaagtcaatcccaacatgctcattccttttccctaatctcatctattagatgaagttctncttctcccaaa

SEQ ID NO: 168 - DNA, 398 bp, Homo sapiens
taggattttaatgaattttggcaagggctgktttaawttttaaattgagaagtaatatgtggaaaattaaaatatattcaaatgtattacaaggtcataaacacataaacatgtagaccgctttataggcttcaaaatgtatttttatatattaccttatttgatcttcacaactgttgtaaaatwtgtcaaatcatataagaaaactgattctcagtgaaattttgtgattaagaggacatgctaatattttgtaaagctgggaccagaacccaagtactggtacttgctttgtgtcctggttactatgtatgttgccagctaagtgggaaataaccctaccaattgttttttctaggagataggattgatttgcaactggatattccttttgcttg

SEQ ID NO: 169 - DNA, 496 bp, Homo sapiens
cccacgcgtccgcccacgcgtccgaaatatatagacatttgttagtttaattgcaataatttctaaaaatgtgtttgatkgtaraagcttccarttaataaatactactgtgtgccggggattaccctaaatgctttatcttttttayctcattcttacaacatgattactatycctactttatatataaggaaattgaaacctagcaaggtgaartaatttgagctaagttatgtaaagggagtggcaggacaagattcagactcatgtctgactttctttgcgtgtgtgtgtgtgtgtgtgtgtgtacgtaccactaagcattgaaaattggaagcgccttctcttagccctctttactgtccaagtaaccaaagtattatcttcctccttccattggaaaccaagttatcttattaattatatgtaatttaaattttttttctctctaaatttcaagtttcctttattactgttgaccaataaattgtaaaaa

SEQ ID NO: 170 - DNA, 544 bp, Homo sapiens
gatttattctgcttaacacaaattaaatgtatttttatataaatattttcatttaaaatagagatttttggcacagagtcctaagcctstaktttaaatgaaaatatttatataaaaatacatttattctgcttaacacaaattaaaactgacataaaattttatgataataacatgattcaagaaatgtgatgtagatttttgagaatgccaaaaatcaggyttcagaaaagctacagtatgaaatctgaaaagcaacagaaattgaaagtgaccttaaagaataaatttcctaatttttcccagtttcctatgtttataactattataaagagtttaactttctggaactgaaggagaaaacatgaaaatgtttatattgcttcttgttaagcaggtagaccaaattccgctttcagtaattcatccatacagaatttggatgactatgtataaaggaaaacttaaatcttaattattatcagtttaaattttttttktttkktgaatgacaaaggcaataaaaataaatttgactttaaaa

SEQ ID NO: 171 - DNA, 536 bp, Homo sapiens
  SITE (494): n equals a,t,g, or c
  SITE (502): n equals a,t,g, or c
  SITE (512): n equals a,t,g, or c
  SITE (529): n equals a,t,g, or c
ggagactaggccctccaggaccctgtgttttggccccaggaattgaggccatctgaatcagctgcctgggttcctgtctgcagtgggccccatgggcctacagaagaacagaggctgctcagggctgggctgtttgctgcccagaaccaaggctaggatgaggagctcagactcttccagtggaagcagtgctaggacggaagacagccgcccctgaagaggggacattgacatacagttgatctgcctgggarggtgtaatagagatgaacttgtgtcatcgcatctttcacacaagccacaaagaaagctaatcctgattcctggtgagaagaaaccaaactcgaggaatgttttatatcacaggacggtcacagcctgtactggggcacgagccagggctgagtagagtgctgcccctgcactcactgacttgatcctctcatttactctgtgggagcaatccctgttgggatcctgctgctttgggaaantgctctgntaacttgcanaactatgaaattgtggncctattt

SEQ ID NO: 172 - DNA, 791 bp, Homo sapiens
  SITE (700): n equals a,t,g, or c
cacatgtgtatagtgaggagcatctgggtgcactggcctgcagggttgctgtagggaggagggaggaaggctctgctctatgcaatgcccgccccagccgtgtgtggggaagacagcgggggctgagaatcagaatcaggagcaggggaggagagtggcagacactccacagaccctgacccagcagaggtcatggaatcttgactcagatgctgtggggcggcgggagatggaggccaaacgcgccgagaggaaggtggccaagggccccatgaagctgggagcccggaagctggactgaaccgtggcggtggcccttcccggctgcggagagcccgccccacagatgtatttattgtacaaaccatgtgagcccggccggcccagccaggccatctcacgtgtacataatcagagccacaataaattctatttcacaccccttgtgccgggctcagtctagcccctgggaggcggctggggtctggcgccgccctgcgcagcccgcgcccacgtcagacgtgaacatcaatttgcttcgaaagccaagggtaaagaggcacgatctgatttatcagtttctaggaaacaccctctgggaggaargcaggcagcgcccgccggagaccttacaaccgcccgctaaccggggaggggggccggtagggcgcctcgggtctcaaggcgccgggagggtctngcggccctgaaggtccctgggtccgagccacagtcggggcagaagtgaggccgagctcgcggaaatccctcaagtgatcaccgaggtctgg

SEQ ID NO: 173 - DNA, 526 bp, Homo sapiens
  SITE (1): n equals a,t,g, or c
nagagctcccagcccctgaatgaggaaggatcagagaagaggctactgggggaraattcagtgcccccttcgccctctagggagcagacctccactgccattgtcctgtgagctgccaaagaccccacgggtgcccgcatgtccctgtctagggcagcccagggcccccactcctggctcctcacacttgcctcccctatggccgctctccagaccctcctcctttcttctccccacatccgcacctgctgttcccactctggggttctcaagtccatgaacagatattgttgcattttccacaatgctgattaaacataataaacaatccagaaaagcagttttgcccagaaagatatggtttccytttgtttatacaccttgtgcgcatkgaaaggscttytttgtgtcgstatgtatgaggttaaatgggagctgatttatcccattaaaacactgtcccaagaagattaaatttaattatgttctgctgtacatccaggtggcaaaacccctttttatgatt

SEQ ID NO: 174 - DNA, 632 bp, Homo sapiens
  SITE (6): n equals a,t,g, or c
  SITE (8): n equals a,t,g, or c
  SITE (18): n equals a,t,g, or c
  SITE (27): n equals a,t,g, or c
  SITE (29): n equals a,t,g, or c
atatcncnttctattgcncatcccggntngctgttacgcctgcaggtcccggtccggaattcccgggtcgacccacgcgtccgattgctttcttcaacaacgtttacttagatatggaatccatttcaaataacctgtggaaatacaaccgctatcgctacatcatgacctaccacgagaagccctggctgcccccacctctcatcctgctgagccacgtgggccttctcctccgccgcctgtgctgtcatcgagctcctcacgaccaagaagagggtgacgttggattaaaactctacctcagtaaggaggatctgaaaaaacttcatgattttgaggagcagtgcgtggaaaaatacttccatgagaagatggaagatgtgaattgkagttgtgaggamcgaatccgagtgacatcagaaagggttacagagatgtacttccrgytgaaagaaatgaatgaaaaggtgtcttttataaaggactccttactgtctttggacagccaggtgggacacctgcaggatctctctgccctgactgtggataccctgaaagtcctttctgctgttgacactttgcaagaggatgaggctctcctggccaagagaaagcattctacttgcaaaaaa

SEQ ID NO: 175 - DNA, 455 bp, Homo sapiens
  SITE (443): n equals a,t,g, or c
caacaccccatctctctctctctaaaaaaagagaactggccgtgagctattgtgcccagctgggatcttgacaaagacactatttctctcctttcacctgtgctgtgtatttttccctcgcctagttcccagacctcactgctatatgtcttctccctggcaggcaggatgacgcaaaacacggtgattgtgaatggagttgctatggcctctaggcmatcccagcccacccacgtyaacgtccacatccaccaggagtcagctttgacacaactgctgaaagctggaggktctctgaagaagtttctttttcaccctggggacactgtgccttccacagccaggattggttatgagcagctggctctaggggtgactcagatattgctgggggttgtgagttgtgttcttggagtgtgtctcagcttggggcccgggatgtnctgagtgcctca

SEQ ID NO: 176 - DNA, 574 bp, Homo sapiens
  SITE (551): n equals a,t,g, or c
  SITE (564): n equals a,t,g, or c
gtacacttaggagattctaaatatgtggcttgatttgaggacagaggctgcttataatctgcccatggtaagcctgtgatctcattagtgagttgatagacatttacaaacagtcaaattgcctatcatctcatgcattgtggacattctgtcagatccttagctcaaattaggcttcatattcatttagatatattgtgattctgccttggaaaatctttcaacaggcagacttagatttgatttatttcagtaaaacatcttctactttgtggcttgtttcatttctattccactataatgatatttccctgaataacatagcaagtgatttagtggttttgtaaacctgcactatgtaataatgcatgatttggggtacaatatgctggattttatcacttggcaaaatgagagaaatgagacagaagtcaagaatttccatgcatttctttcaaaatttaaatgatgagttttccaattaaattttcttgtgatatagtctcacgttaatgctgaaatgttaaaaaaagaagactctttaacactgntgaacttgaaagncatttgagta

SEQ ID NO: 177 - DNA, 601 bp, Homo sapiens
  SITE (60): n equals a,t,g, or c
  SITE (584): n equals a,t,g, or c
caaagctggttcgcctgcaggtaccggtccggaattcccgggtcgacccacgcgtccgcncacgcgtccggagaccagcctgggcaatataacaagattccatctctacaaaaaaatttaaaacttagccagacatggtagcactacttgtgaggctgaggcaggagaatcacttgagcctgggacttcaaggttacagtgagctatgattgtaccactgcacttcagcctgggtgacagagcaagactgccattcattgacttataaataaatacatacgtacacacaaacaaacaacttgtagtgtaggtckaaatgaccgtagagaggtacagattgttagggcctcataagttcattggaagaaacagttaggagctagaataggcagacaggcttataggaagttgataaagggcatcagcaccagtgtaggagtcagatgggtggaaaggtgaagaaaggacatcccaggcaggagcataaagaatgcaaaagtgttkgggaaaagatggtagttatgggacattttgaagacatcaaaacagtaccacaaacaaagcccttgatttgaaaaaaaacngaatttaagattttttt

SEQ ID NO: 178 - DNA, 665 bp, Homo sapiens
ggtctgaacggtgacggtggcccctgcagaagcatgtggctaaatctccaccagggggcgatagagctcctccaaatcaagctgctgcccctggagaaaaattggcggaagtcacagagcagtccccaccaaaagtgtttaccaagtggagtctttcctgctggcgtttcctcagggtcaggaagcaactttcccaggacaggggcaccctgaggtccgggtccactgagctatgggggcggcgtgggcctgggctgggttcttgccatcctgggcagcttcccggcgtgggtgactgagcccgggtyctggagtccscggtcccagcgtctccacttctcagctgattcctagaagctgagtcccgtcccttctccgagcgtggtttcctctcccgccttgcctgcgtcgcaagcagttgtgggagcagaagtgtgtctgtgcatctgtgtctctgtgcaggtattttagaattgttaggatcattatcaccagctttacttttcccaaccatttttttcctcctttttttctcttccttcttctgccacagcaagacccccccgccccaagcacagtagctttctcagcgtcgaatccctccgtgggaccatgttgcaatgaaatttcaacatgcaaatgaaaaaaaaaaaaaaaaaaaaaaa

SEQ ID NO: 179 - DNA, 358 bp, Homo sapiens
ggtgcatcgggacggccaccgtgcaccggtgcctcacctcctccctgtccaccagtgttttcctagtgagcaggtgaaccaggggccacgtacactctggagtctccccgactgggacccgggccggccgcatacactctggagtctcctacactgagacccgggcctggctgtctcaggcggctcccatgttggctctgggtacagcccgggaggcgtgtccagggccgtgttggcscggctycccttggagccactcacctgtttgctttctcacccagtcctcctcatgcagaagtaccggcggtgcggctttccgcagctgtgggcagccagtgccttcaagggtgccacgggg

SEQ ID NO: 180 - DNA, 875 bp, Homo sapiens
  SITE (8): n equals a,t,g, or c
  SITE (118): n equals a,t,g, or c
  SITE (807): n equals a,t,g, or c
  SITE (869): n equals a,t,g, or c
agaattcnagagttcctggttctgggaactcttccacaattgttcctctgggaaacgcagatggaacagtgactctggggctctgcatgctcagggggtcmattccccactyagsgantwacgctgtgctgggcctcaccaccgtcacagacgatgctaccctaggcttggcttcagcttctaaaaccctgggacttcattacaccacggaggaactgggaaaccagaggccacggtaacttcccacttttgaaattgtgcgggggtttgtaaaggaaatggggctacagcaacatgtattcttactctcgactgcattataaagcaccatatgtaccagcttgtttttgtgtattttgaaccgagtaagaatatccaaggtccagcagtcaactaaactttctatatagctcatcccagaaacacataccatcccaaagtctttatagcaaccaggctcaacctcataggtttgttttcaagttttttttttcttcaaactagaccttcgcagggaaatattatataactatggtgctcagttcaccaaaatttctactattctcattttggggaagaaaaaattattttcattttgaaaatgaatttgcatcacaatgctcttattaacatgcccattaactaacctaaatgtctttatacacctcaggcatatgcatatcttataggaggaggattagggaatagcagttttcttccttcccctgctccaaaagtgctacttagggaaatacatcctttgtgattaaaaaaaaaaaaattgkatggtacatgtgcaagttctantccctgatcggaatcaaactgtgtccagtaatcaaggatcattgcacatgctaacaatttgncccttc

SEQ ID NO: 181 - DNA, 561 bp, Homo sapiens
  SITE (23): n equals a,t,g, or c
  SITE (32): n equals a,t,g, or c
tcagagccagcagagaatgaggntaagtcagnacccattctgtgacaatcaacaaagcagccctgatccctggactttctcaccattaacagagactgaaatgcagattacagcagtggagaaggagaagagatcttctccagaaacagggacaacaggagatgttgcatggcaaatatctcccaaagcttcgttcccaaagaacgaagataattctcaactggaaatgctgggcttctcagctgatagcactgagtggtggaaggcctcaccccaggaagggagactaattgaaagtccatttgaaagggagctgtctgactccagtggtgtgttggagataaattcttcagtacaccaaaatgccagtccctggggagtaccagttcagggtgatattgagcccgtggaaacacactatactaatccttttagtgacaaccatcagtcaccctttctggaaggtaatgggaagaactcccatgagcaactctggaacattcaaccaaggcagccagacccagatgctgacaagttcagccagcttgtaaaattagacca

SEQ ID NO: 182 - DNA, 410 bp, Homo sapiens
  SITE (50): n equals a,t,g, or c
  SITE (51): n equals a,t,g, or c
  SITE (59): n equals a,t,g, or c
  SITE (394): n equals a,t,g, or c
aaagctggtacgcctgcaggtaccggtccggaattcccgggtcgacccanncgtccgcncacgcgtccgacatgtctttgggtattattctggaggtatgtttcttttatataagatttcaagtttaaacatttacaataagtaataatatttaaattcttataacaagtaatgaaatatttggtttagtaattagcttagtctattttwaaaaatcattaaaatttrctttgtttttaagaatgccatactacaaatgatgttatttggttttaatggtgttttgtgtttaagatagaataaatagagtttgaagaatgtgaaaattagttatctatgttcctacattttatttaacaaaattgagcctaacttgctagctagtacacacatnaaaaataactgactaa

SEQ ID NO: 183 - DNA, 772 bp, Homo sapiens
  SITE (5): n equals a,t,g, or c
  SITE (35): n equals a,t,g, or c
  SITE (43): n equals a,t,g, or c
  SITE (262): n equals a,t,g, or c
ggtantgacttgctctgccgtcttattccaagagnggtatggnatgacagctggagatatcattgggaccctgagtggattcttcactattatcattggcatcttccttctacatgcttttaaaaatactgacattacttggagtgagcttacatccactgctaagaaagaagccgtctctctgaatgtcaatgaaaacaattatgttttactagagaacttggagtgttcagccccaggatacaatgatgacgtaccttgnttagtagaactgatgactgaagtctctagaaacactgagttttaaccaatatgagacacacgaagaggaaaatgaatgcttgcttcttggaagaactgctaggaaagttagcatttttgcagttctaactaatttagatgtgaggccaagtaaaaatgccatttttttggccattgaatttgaaaatcaaattgattatcctccagaatttctacaaactttgaaatactctctaaggatcaaagaagtcaaagatctatgtgtgtctcagaataatctccttcttctggtcacagtatctttgtctctgccaggtggctcttcatttctttggtagctatttttagaccttacagtcattcaccaatatacagttagcagtgttctgatagacacagtatcagtcatattctccgttggagtcataatttcaaactcaacaagatttcagaaaggtataatcatggtaatttctcatattaaaactggagaagagaggccaggcatggt

SEQ ID NO: 184 - DNA, 557 bp, Homo sapiens
  SITE (552): n equals a,t,g, or c
ggctactgagattttgatttgaatagtatttcttcctgataatttctgagtaaaattcattttaaggaagtaggaggggcagtggcctgatgaaaagcaaaaatgaagaaaagaataaggaaagacacagttttgccatcaccagccagtgtttagtgatcttaaaatagctgcttttgtttttgagcatcakttgttgggtatggagttgcagaagttgggttgagggacactggcttctagaatcaaatattggcctccatagagtgtttctgtacagtgagttgggaggatgggcaggggccactgaggactgtggcgtgtccccacgttagagtgtatctcacacagagcctgtcctgaaaatatagttatttttaaaaagtgtttccccctccttttcattggccattttctcttttactactctttacctagcaaagggtgggcatgagaaacctggtcagtggaagagaaagccattttgcaacagtggttataggggtgggagagtaaaatttcctggctcctggggaagctaacccattggtnggacc

SEQ ID NO: 185 - DNA, 516 bp, Homo sapiens
  SITE (13): n equals a,t,g, or c
  SITE (40): n equals a,t,g, or c
  SITE (47): n equals a,t,g, or c
  SITE (489): n equals a,t,g, or c
  SITE (514): n equals a,t,g, or c
aaggaaccctttnaaaagaaggtgccagcaattcccccgnatggttnggggcaagtaaaaaatattttttaaaaccccctcaaaaatattccccctaaagtgggtatcctcctattttaaccagaagaagatccgaggtcctaagccaggttggtccatttggctcaagctcatacagttgggtatgtgggtagaacccatagtctgacttcagaatcctaggatgaacctaattcaatcaaaatatccttctgttttggcattgcattactaaattgtatagctggaaggcagctatactagtgttttactgtatatctctattccagtaatttcatctctacttaattgttatcatctgttaagtgggattgtttatctgcacttgatagtaaaatacggtctacttaggcttggatgaaaaaatctttagtgaactttacctatcatctataggatcatgttgttctgctaaaaaaaaaaaaaaanaaaaaaaaaaaaaaaaaagggcggncg

SEQ ID NO: 186 - DNA, 770 bp, Homo sapiens
  SITE (1): n equals a,t,g, or c
  SITE (4): n equals a,t,g, or c
  SITE (666): n equals a,t,g, or c
  SITE (744): n equals a,t,g, or c
  SITE (745): n equals a,t,g, or c
  SITE (749): n equals a,t,g, or c
nccnagctctaatacgactactatagggaaagctggtacgcctgcaggtaccggtccggaattcccgggtcgacccacgcgtccgaggatattacgcagacaactccactggccggtgtgagaggtgcaacaggagctgcaaggggtgccagggcccacggcccacagactgcctgtcttgcgatagatttttctttctgctccgctccaaaggagagtgtcatcgctcctgcccagaccattactatgtagagcaaagcacacagacctgtgagagatgccatccgacttgtgatcaatgcaaaggaaaaggagcgttgaattgtttatcctgtgtgtggagttaccacctcatgggagggatctgcacctcggactgtcttgtgggggaatacagagtgggagagggagagaagtttaactgtgaaaaatgccackagagctgcatggaatgcaagggaccaggggccaagaactgcaccttgtgccctgccaacctggtgctgcacatggacgacagccactgcctccactgctgcaacacctctgatccccccagtgcccaggagtgctgtgactgccaggacaccacggacgaatgcatccttcgaacaagcaaggttaggcctgcaactgagcatttcaagacagctctgtcatcacctnctccatgatgctggtgcttctgctcggggcaacttgtggtagtgtggaagaaatctcgtggccgaatccagccagcannaaangccggctatgaaaaactgggc

SEQ ID NO: 187 - DNA, 380 bp, Homo sapiens
  SITE (341): n equals a,t,g, or c
  SITE (373): n equals a,t,g, or c
gcgtcgactaaagcttcatatgcattaatggaaaaawtgtcaagaaagagtgwcaaattgagcgttcaactcaagaagttagaaaaagtacaaaataaagctcaasaaaatggaagtaataatagcacaacttagtgaaataaaacaaactaaaacatatcagcaraactgaaagtgtttctttgaaaagaaaatgttataaaaagaaatccagagcttgtgcaaggaaaatgaaaagataccagcaaacaatattaacagtaaatatctctatgtcaatttttactggtaatattgacatagagatattcaaatgattaagaggatattatgaccacctncgaataaattttgaagcctaataaatggggantggttaa

SEQ ID NO: 188 - DNA, 689 bp, Homo sapiens
gccagtattagacctgggttctgtctgttccgagcctgtgctccctctgccaaaccaatcccttgataatgctacatacgttgttttgagttctgttgtttttcacttaatgtatcaaaagcatttcactgtgtttctataatattcatgataatctttttaaatgactacatgattttttacctcatgctgacgtactctaatgtaaaccagtccctgaaaagttgaatgtttatttctaatttctttgatgttggaaatcgagtggtgagttctgaaactccctcttgtcccctaaaaggagcagctggcctggtgcagatgtagcctttggagggtctccatgttgtttggggaatgtgtctccctgtgtcagggaaggctcatagaaggagagcttggattcttatccttgaccctctggcttctggttcaagacatacttctttgctgggcccttcagaaacccctcatcttcccctcttcctcagggagagccaaaatcatctgccaggtctctttttacccaccagtttgatcgtcttactccctagtcccaaatccattctctatgcttaaaatccttcctgccttccctcttccaagtcttctctaccccctctagagccaaaaaaaaaaaaaaaaaaaaaaaaaaaaaaaaaaaaaaaaaaaaaaaaaaaaaaaaaaag

SEQ ID NO: 189 - DNA, 635 bp, Homo sapiens
  SITE (74): n equals a,t,g, or c
  SITE (631): n equals a,t,g, or c
  SITE (635): n equals a,t,g, or c
tagggaacagaaaaatcttactccaggttagccagccagttgtttaatggattctcggtcaaaccaactatggngcttctacctgtgggaatcaggtgctagcccatttgcctcgatttcagcataactggtaaaagactgggttttagattcaaagtctgggttgtgatccgtgtacttactgattattgacgtcagttacttctctgaacctctttccttctctataaaatcataatgcttcactggattaatgaaataagatatttgtgaaagaactctgtaaattataaaaagttaaaaacttttacatatagcacattatgtgactagtaagtactgctgtgtcttactagcgcaattttctgtggcagcattgacacgtatctcctaaaaatataaagttccccacgtttacaagcagcatgataggttcaggaagaggaggtagatgagaggtaacatcttattatttatgtaattatgggctccataagtttattttttaagcaccatatatgtgtgtgtttcaaaataaacataaggcatcatatatttaaacatatataaccataatgcttgtatttataaatcattttccaagaaagaataaatcaaaatttgaaatcanaaan

SEQ ID NO: 190 - DNA, 469 bp, Homo sapiens
  SITE (171): n equals a,t,g, or c
atggaatactatccaagttaaaaaaaggaaaagaatgatacctatgaactgatacggatggttttcagtatatattgctttgtggaaaataaaaatgtgaaatagagagtatgctactttttttttttttcctgasacagagtttcactcttgttgcccaggcgtgagcangcgcgcctgacaagagtatgctactttttgtgtatgaaagaagggagaggccaccgctggctcacacttgtaatcccagcactttgagaggccgaggtgggtggatcacctgaggtcgggagttcaagaccatcctggccaacatggcaaaatgctgtctgtgctaaaaacacaaaaattagctgggcgtgatggcagacacccgtagtcccagctactcaggaggctgaggcaggagaattgctcgaacccgggtggcagaggttgcagtgagccaagatcgcgccattgcactcca

SEQ ID NO: 191 - DNA, 604 bp, Homo sapiens
  SITE (548): n equals a,t,g, or c
cacgccgccttcgccgctggctccgtctgttggggggcgaacacgccgcggtcctcgtcgtgatggctctgagagattcctctgcgaatctgtttttagctatcaagtggcatccacgcttaaacaggtgaaacatgatcagcaagttgctcggatggaaaaactagctggtttggtagaagagctggaggctgacgagtggcggtttaagccatcgagcagctgctgggattcaccccctcttcaggttgatactgcctggatggtcacctctggtgcgcacaagtgcaaagccagtgggggactttctcacagcttacatagccatccagagatccacagctacgtcactgaattgttaatgcacatttgtacttggtttctctgtatctattcacaggcaacaaatacttatatgtgtgatctttcagggaatgttttgtttatttgtttttaaaagtattgggaatcagattaagacaatcagtttcagagaaccaggaggtttggggttaagagatactccaaaattttcacaagccaagtanggcatatatcagatttggccacttgaatggcgtctgtcctgtcatccatatggtgc

SEQ ID NO: 192 - DNA, 270 bp, Homo sapiens
gtccttcttctccaagcagcctgtacgcaataagcacccaacagggtggaagagaacggaggagcccccaccacggccactccccttcagtgacccaaagaagcaggtggacacgaacaccaaaaatgtctttgggcaaccgaggttgagggcatccctccgagacctccggtcaccacggaagaactacaaatccaccatcgaggatgacctgaagaaactcatcatcatggacaacctggggccagagcaggagagagacacgggaca

SEQ ID NO: 193 - DNA, 429 bp, Homo sapiens
  SITE (361): n equals a,t,g, or c
  SITE (382): n equals a,t,g, or c
gagaagagggcagagcgtgcatggggctgctccccaggacctgagcaggaacctggagttttcagagctgcctgatcattgctacagaatgaactctagcccagctgggaccccaagtccacagccctccagggcmaatgggaacatcaacctggggccttcagcaacccaaatgcccagcccacggacttcgacttcctcaaagtcatcggcaaagggaactacgggaaggtcctactggccaagcgcaagtctgatggggcgttctatgcagtgaaggtactacagaaaaaagtccatcttaaagaagaaagaagcagaacmccatcatggcagaacgcaatgttgcttctgaaaaaantgcgggaccccttcctccttngggctgcgctactccttccaaaaacctgaaaaatcttcttcctgctc

SEQ ID NO: 194 - DNA, 582 bp, Homo sapiens
  SITE (573): n equals a,t,g, or c
  SITE (576): n equals a,t,g, or c
ccccagtctcaaatgtgagagacggactctgctccgtggacatgagcagccccttgaagggtggtctcattctctaacagtaacagcactgccagaaacaccccctgaatgccacacgatcatctcactttgggtcaggccagcagggcctcacgatcatttcttgaacttgaattttcagtgttattgaatctttaaacatttaaatccccaagcaaaaatctcattacagtgaataaaaaggaatccaatcaaacaagccaccacttccctaatggatggactacctacaactatagtgttttgttatttcaataacaattctatgcacagccaattctccataccaaagtactaaaaaaatgtttaacaagcatttttgaagaaaacaaagagaacttcattatggttaaacttgcttttcatctcagtgttgctttttttaacctgwtaataacattgattcttaaaaagtcctaatcaaacttctttatttggatgggccctaaatattcattttcagatttctcttcaaaagtttgaacatcatcattaaaaaaaaaaaaaagcggncgntctaaa

SEQ ID NO: 195 - DNA, 507 bp, Homo sapiens
  SITE (490): n equals a,t,g, or c
tccgcgggctgctgcccagagcaggctcccagcaccatgacggtttcatacactctcaaagtggcggaggcccgcttcggaggtttctctggcctgcttctccgctggaggggaagcatctacaagctcctctacaaggaattcctcctctttggggccttgtacgctgtgcttagcatcacctaccggctgctgctgacccaggagcagaggtacgtgtatgctcaggtggcccggtactgcaaccgctcagcagacctcattcccttgtcctttgtattgggtaaggctcccttctagttttccctgtgtcccccttactgtgttccctgacctctgggttgggttgacagctccgagggtcagaattacccaacagatggtgtggtgacacacctgcagtctcagctactcgagaggctgaggtgagaggatcgctttgagcccaggagttycagtccagcctgggcaatggagccgaagactctgnttaaaaaaaaaaaaaag

SEQ ID NO: 196 - DNA, 473 bp, Homo sapiens
  SITE (110): n equals a,t,g, or c
gaatagagtggggttccttcagatatcctataggattctgcccctggttttgtataggccttggctagaaagagtcaatgtttctgagctctcaaaccagttgctctcanaagataggaataccccaaggttcctggcatttttcctatttsatttttgttcagactgatattytgccaagagcacaatgactgaggaatgtagccatcatttgcagggtagtgattggttcccagcctggcttccacacaggacaggaagggaaagcatccctgagctctcctcagtatttccggatgtaatgaaagaggacatctttctacacaaagtcagccccaacttttggcttggtcacaggagttctgatagtactgtttggtgcactcatgggaaattgaaccagtcgtagccacagtctttcagagcctgggctctggggaattggaagtgaaaaataaagatgtggcttgttg

SEQ ID NO: 197 - DNA, 686 bp, Homo sapiens
  SITE (631): n equals a,t,g, or c
  SITE (636): n equals a,t,g, or c
cgagctggtactcctgcaggtaccggtccggaattcccgggtcgacccacgcgtccgakyaaaataacattcctacagacaatgaaatcatgccagaaagacaagttaataaaagaggttaaaacagaaacatactatttcaaaatgaactaaaatacaaagctttaaaaagaaatgaagaaagacattaaaaaggactgaagatgaagtgtcaagtgataatttgacaagtcccaatgggttactggatctaggcattggcctyagtgactgktaacataaaaaagataagcaaccagagactgtgaccctcctgatgaagcaatacaccaccagccatagtgttaccaaagcaatcgaaacagcatctcaccaccctctgggtccaactgctgacccacagcgcatataaagggcagaggaacactttgaactgcatcttgactatgcaagcagctaaatccaaactgagggaaactctacaacccagattcttcaacagataaattgtaagaaaaagaaaagtgagaggccgggttcartggctcgagcctgtaatcccagcactttgggagggcaaggcaggaggatcgsctgagccmaggarttygaggttgcartgagccatgancgctncattgkattccagcctaggagatacaggaagaccctgkgcttaaaaaaaa

SEQ ID NO: 198 - DNA, 487 bp, Homo sapiens
  SITE (459): n equals a,t,g, or c
  SITE (467): n equals a,t,g, or c
  SITE (470): n equals a,t,g, or c
  SITE (480): n equals a,t,g, or c
cgcctgcaggtaccggtccggaattcccgggtcgacccacgcgtccgttcacgcgtccgctaaaattccaatctgtctcagatatagactgcttcactttatcttcttccttctttatatgacattttgacagatgaatgaggagggaaggaggggagggagtttctctttttgtaatgcttttttttttttggttttgttttccatttcaaaatgccagccacatctggagtggctctcctatacccttctctgtccctactcttcctgctcattgctggccatcttacccaaccaggcccaaagaggcaggggaaggagggcaggaatgagggcatgaaaagagcttcgaggtgaaaagaagtcccttcgtcttccttgagggtccctgctgtccccagctgtgcactaggcatttgggatggaggtggggggatgtagatgggaaacatgcccttnactttcantgngatgtcaagnctgttga

SEQ ID NO: 199 - DNA, 320 bp, Homo sapiens
ttttgaacaatacaggtttgaactctgtgggtccacttacatgcggttttttttttctgtaaaagttacacccgatgcgtcagccccttcttctacctcttccacctctggcacccttggcacagcaagaccaaccccccacttcctcctcctcctcctcagcctactcagggtaaagacaaggatgaagacctttatgatgatccacttcacttaatatataataaatatattttctcctcatgattttcttaaaactttttctgtattttattgtaagaatacagtatataatacataaaaaaaaaaaaaaaaaaaat

SEQ ID NO: 200 - DNA, 611 bp, Homo sapiens
  SITE (9): n equals a,t,g, or c
tttaccttntacctaaattatacatttaaaaaatctatatttggaaaggtgtgcctacattcttacatgttattttatttaagtccagagatcaacactttcctcatactatacacttttatcataatgagaaccagtgaagaaataagattaattgaatggtaatttactttttggatatcttttcaggaatgtactacttctgtatgtaggatacttgttatgaagacctttccaaattcatttgtatttctgttaaatttattttttacttttagagtggctatcattataatgtaatttaaaattatatttgtaaaagtgactattggagtgagtacgaattttgtttataaatctatgataaatgcattctccctttaggaggtagaaaagtatagagctgtatataataagtcgctatgaacatacatttctcaagtcagaatttgaacaccagaaggaagagtatgcacgtattttagatgaaggaaaaataaaatatgaatcagagattgcaagactggaggaagataaagaagaactacgtaaccagctgcttaatgttgatctcacaaaagacagcaaacgagtggaacaacttgctcgag

SEQ ID NO: 201 - DNA, 648 bp, Homo sapiens
  SITE (441): n equals a,t,g, or c
  SITE (631): n equals a,t,g, or c
gcgcagacatttactgtgaaaactgcaaaaccactctgggctggaaatacgaacatgcttttgaaagcagccagaaatataaagaaggcaaatacatcattgaactagcacacatgatcaaggacaatggctgggactgattggacagcatctacccaacccagtgtccacgtgaacgccattcaaccgaacattcttcccaagcgtgagagagtgactgacacttggttccatccatttaggggccttgccatccggggcatcctcccaccctgacgccatctttctggtgaccggcctctaaatcgctgtctctctgtctctttgctttgtatctgtttgtgagttgatcctggcttctctctctgttctagttttggctgaaaacaaaacaacaaaaggaacakatccttggacgcatggcggcarcccaccttggtnagrgcccagggcccatgcgagagctcctgatggcctcttgtcaggagagcagtggcacgggggcgtgargaagagggaaaggggaaactctaagggtcctggcgcggggaaggggtggaagggtggaggtaggaacaaaattgcgccgctcctggagacctgataacttaggcttgaaataattgacttntctaaaaggacaaagag

SEQ ID NO: 202 - DNA, 343 bp, Homo sapiens
  SITE (343): n equals a,t,g, or c
gactgggaaagtcatgtccagcctccggggcagaaggcagaggggacttaaatgacccacatggcagggcttagtctgtgtgtgtctctatccccsagtcctgtgcacagcayctgccaaatacacggtgtttgacgcagagggatatgtgaagccccagtcttgcattgacattgtgattcgccatgtggcacccattcccagccactgtgatgctcataccttaccttgcctcctaccctcttctctttcctgcctactccccactcctccctgacaaaaaacacccagggatttgtactcattttcaagttgaataaaatacatttttaaaatgaaaaan

SEQ ID NO: 203 - DNA, 291 bp, Homo sapiens
tttttttttcagatttcataggattttatttttctactaacacagacagacagggaaacctacaaaaggaaacggagtcaattgtaaatggctgtagttactggttacacggagttgacaacacaaaggatgcctggtgcttgcgtgcagaggctgcagcaatgccagccctagtctggctcctcagaaacatctgggggcacaagtgcagcctctgccccgatttgaactttgttgatggggctgattcccttgggagaccatgcaagccagacgtagcccaaggcctgg

SEQ ID NO: 204 - DNA, 568 bp, Homo sapiens
atctgctccagtagaatgagttactttgtatgagatagaaggtgaaaaagagagaagaaattggcaacactcttagcccactgaaagcagcctgcttcagaacctaaggccttgtggttatttttactcgcttgcaaaagtgaggaaggatgttataggtctctttgagcctctttgcttttaccctttatttctatatgatctacatttatattaataaattattacatgccatataagttccagaatcattccttttgacagtcccatgggatttaatcccctcctaaatcccaaaatatagaaagagaaaatgtttgggtacagcactggggcatcatgcatactgaatattcaacaataaccatttgaatgagtggatgatttgggggtcattccttactatgtgactgctcttctctcaggcagtcttagtccctgtgtcactctcctagtgtgtagccgggctgctgcctgagtgtaatcctagcctttcaagataaccatttattatatggtgctgacccctaacaacacaagccagctccatcctctggtactcagcaaa

SEQ ID NO: 205 - DNA, 452 bp, Homo sapiens
  SITE (38): n equals a,t,g, or c
  SITE (369): n equals a,t,g, or c
gctagttctagatcgcgagcggtcgccctttttttttntttttgtttttaggaatttattgcaagcatacaatcaaatgtacagaaggattaatgcacaaagcaatcttcattatagcatcattaaaaatagcataaaaataattaaaaataaaggaaataatcaaaatatcctaaattggaaataatttaaataaattttggtatatgtcgataaagatcatttataaattttcaaaaaaacttataattgaacagattacaaaacaatacaggttacaatacaatacataacagcataactgtaacttcgtaaaagaaagtatgaaaagataaactcatagaatgataaaaatgaagtcagttattncctaaatggtttccctgaatcaatggttataccttgggtcatggcactacggtaattttattacaatttctttgctctcctct

SEQ ID NO: 206 - DNA, 442 bp, Homo sapiens
  SITE (15): n equals a,t,g, or c
  SITE (434): n equals a,t,g, or c
  SITE (436): n equals a,t,g, or c
  SITE (437): n equals a,t,g, or c
ctcttctccagtttnatccccactttacagctacagttatctaaaacacaagtctgaccatgtcattctccttaaaaaccttccctggcccataggattaacccttggcctttccttcacatgataaaagtcaagagtacagttttcaagccagatataatacgagtgcaatattttgatagtatactcccttcatcttttttcaggaagygaaatgtggtgattttaaagctgttatagtggaagtatcaggacaagcccattacacgggtacagcaagctttatagtagaagatgacgacccattgagggatggatttcttctcaagtgacttcttccatgattttaagggctttctttttaaagtaatcattatccttaaggactgttttctctaaattatatgaaaacaaataaattatacatataaaanannggggg

SEQ ID NO: 207 - DNA, 377 bp, Homo sapiens
  SITE (377): n equals a,t,g, or c
gtttcatctgtacaaacyagtcggcacactatgatggcctgtggacaaaatccggccctctgactgtttttgtaaataaggttttattggaacacagcccacacatatttgttgacttattgtttttggctgtttttgtacttcattggcagagttgagtaattgcagcagactctatggcttgcaaaacctaaaataattactttgtgtagcgctttatagaaaaaatttgctaactcccgatctgtaacccccaacctatccgccgcaccctgatctaggtaattttgaagcaaatcccaaatgtcacatcatctatccatatttcactatgtatttctaaaacatattcttttattcaaaataaaactctaatn

SEQ ID NO: 208 - DNA, 536 bp, Homo sapiens
  SITE (8): n equals a,t,g, or c
  SITE (50): n equals a,t,g, or c
  SITE (536): n equals a,t,g, or c
cccagagnggttccattttcccttaagagtgatagtggattggaacatanctaatttcagaagaggggcctttaaaaattgccactcataaggaaagaaagaacyttttcacawawttttgaaagaaacgatggtgagaagatawtcytgataatagagatatgctaacatttgctttgggtgttttgtaggttagatttttttggtgtgtactttataggyttgcatattgcttactttaaacagctgaagttctaagtaagagtgttcatatatgtgaaagagttcttaaagtactatatagttttgttattgtattgaatatatattgttctaattcctagagtatgtcatcttctatatactctatacagcaggaatccttgctgtacaacaattatattaaagaaaactctcagttatcctttatggtcttgtcaatcaaatgttttggtcaatgcatattactaactttcatctaattaatgcacaataaaatatacttagtgtgawaaaaaaaaaaaaaaaaaaaaaan

SEQ ID NO: 209 - DNA, 377 bp, Homo sapiens
  SITE (375): n equals a,t,g, or c
aagctggagccgcttgtatttattcggtacagacagaacgccaaaggcctgaagccaacacaatttgtgagtaatgaacattgtcgcccccctttgcagggagcagtcttgcactgatcaagggttggtttctggaggacatatgtaaacaaacttatctagataaatttctttacactaccttgttacctactcttcgccctcagcctcggggtaagagaattagctgccttcagctttattctctctgaagctttgcaaaacctcccagccttccaagaaggtttgcgtctttccttatagcttctcctaccaccctgactgatttcctacagtccgaaacttaaaatatccctcaccttccacctcaaactnca

SEQ ID NO: 210 - DNA, 350 bp, Homo sapiens
  SITE (13): n equals a,t,g, or c
  SITE (51): n equals a,t,g, or c
  SITE (350): n equals a,t,g, or c
ttctgcgcatgtncccccctcccccatattccagcttgcctgcaagctggntagttctaaccaacagtaaaagaaaaacgaactgactaaaatccatactctgattgttcagcaagagacattgctaaatttcctgtccaccatttgtacttttatgtattttagggctacctagagagttcttaaaggcccagatgatgaaatcggctgcccttcttcccaaatgagttgcacagtccatctggagagggcactcacacttttgtatgaagctgtaggccataaaatggraagtaaagaattaaaaactgcagccatttggtagcagttataaaaaaaaaaaaataggn

SEQ ID NO: 211 - DNA, 603 bp, Homo sapiens
  SITE (561): n equals a,t,g, or c
  SITE (585): n equals a,t,g, or c
tcgagtttttgtgccagttgatatttgttataaactttcctgtgtgagaatcgaacattaacaaaatttgcctwwggtgtaacatttacctggggaggaatattttttaaacgttaaggagaaactccgtcttaaaatattattcactatatacattttattgaaaaaagcatctgctattaagatatagttatggcatgtttaattggcgaatttctgtaatttttatgttttatttatgtggcctagctaccagatcatggttatagagaatatttggggtatagattagtcactacatttgtgaaggtttaggaagtatttactgaaatgaaagacataaccctagatgttttaaatgaatattaagagctcaatctaaatataggaaagttgaacattgtcaaaagataatggtggagcataaaaccgtactcaactctaactgtaattgtcaggcaaactgtaaattctattgttaattgtgtaataaatataatttatkgaakgttactaggttccaggcaggatttaggcgtttgcaggaactctaattcatgnaatggtaaccaccctataagggangggctattataccacctc

SEQ ID NO: 212 - DNA, 261 bp, Homo sapiens
  SITE (102): n equals a,t,g, or c
ttcaggtaggcaaacctgtagggcaggttggaacctgcagagaagcctgcagtgagggtggggtctgcactgagccttctcaaagggatgtgttttacaggnttctctcatatacacaatcagggaataccttctggattcttgggtgttttgttgttgttgagacagagtctcactccacacccaggctggactgcagtggcatgatcttggctaactgcaacctctgcctcccaggttcaagcaattctcattcttcag

SEQ ID NO: 213 - DNA, 277 bp, Homo sapiens
  SITE (42): n equals a,t,g, or c
  SITE (120): n equals a,t,g, or c
  SITE (238): n equals a,t,g, or c
cggcaccttcttcaggaggttgaggtgacctggaaggtagcntgatcctcccaccgccccacagggtctctgcgtaccccctctacaggctggaatgtttggcctgggtccctggccctntgcgggcctcggtttcccctcctgtaatacttgtaagaactcagcctctccctgctcatctacatggtgctggggccactaaacagacagggagtgcgggaagccccaggtgacggtnacagaaacctggcaccccctagaaacctgaccctggcct

SEQ ID NO: 214 - DNA, 481 bp, Homo sapiens
  SITE (14): n equals a,t,g, or c
tgagcagtgagatnacttatatattccaataacctattttcaacaactcctgcccaagacatgaagatcaaatcaggtttctgaggtaagtgtacttctaaaccatacacacatgaaagctatgaaagcaattcaaatgaggctgcttcatgaggcaatctagacttatggcattatttctacttttctccatgttttaattgcagcctgcactttaaatctttcccaataatttttaacagtgcctctcaaatgcaaagacacgtaaaagaattaataactagccaaagaattttatcaccgcttcactcatttataagaaaaccaattatttccaagcaaaatcaaaccaaaccaaagaggctcctggtagaaatgaaacaaaactttaaagctagttttaaaacaaatattttcctctgctctaaactactctggcgttttctaccactctaccattttgggaacatttcattacaat

SEQ ID NO: 215 - DNA, 287 bp, Homo sapiens
  SITE (77): n equals a,t,g, or c
tttatttctagttgatttaggctatcatttaaaaaataaaacaggaagatgtcaaaattgatggtatgattttcctnatatcaatttctgtatgagttaagagtttaggttacctaattttgagacattcttgcgttcctgggatgaaaccctagtagatcatgatatgtcattctttattccattattaaatttattagctgatatttgatttaggacgtgtgtgtgtgtgcgtgtgcgcctgtgtgtgtgtgtgtgtgtattcggacagctatataaaattattt

SEQ ID NO: 216 - DNA, 493 bp, Homo sapiens
  SITE (466): n equals a,t,g, or c
ccgaaatcccgtatcgtagggcgacggcggcgtagaaagtgcttcctggagcgcagacgaggtcatgaatcatgtgacggtggcttgaggaggaacctgtctttaaagctgtccctgaagtgacagcggagagaaccaggcagcccagaaaccccaggacctaaagcgattcttgtataaaaagttaccaagtgttgaagggctccatgccattgttgtgtcagatagagatggagtacctgttattaaagtggcaaatgacaatgctccagagcatgctttgcgacctggkttcttatccacttttgcccttgcaacagaccaaggaagcaaacttgggactttccaaaaataaaagtatcatctgtttactattaacacctaccaggggggttycattttaattcgttttactttgggtgggtgagttttcataggccaggcaggcagtgcccattacagggantaattgttcagcctagggaaaagggaa

SEQ ID NO: 217 - DNA, 424 bp, Homo sapiens
  SITE (424): n equals a,t,g, or c
cacaatcgtttgtatgccctgagttttctctcaagttaaaaagtcaccccaaagatgtcttaaatgggcaaaatcaccagtgtccaatgcaaggatttccttttccgttttgacatggtaattttcttggtaatataaatcactttaaaatcattccagttcaaaggaatataatctctcaaaaactaaatgacttttccttcacagaagttaatttaattttgtttggattattgtacaacctccctttcattacaccaggcacatatttcaacagtagaaactttttttaaaaaaatcattatagaagattacattttgcaacggttttgtttctccagagaaaaaagtaatactaatttaataatttacttgagaaaaacctctgacaattgtaaatgtccatctatatacgtaattcctn

SEQ ID NO: 218 - DNA, 535 bp, Homo sapiens
  SITE (116): n equals a,t,g, or c
tttttaaatttttaaaattttttaacgtggaaaaaagctgcgccttcctttaaaacctccccagtaactccctgccctttttttttccccgtgggccttttaaagtgaaasctgcnaggattttatctttcaatctgccctttctacccttgtcctattgaaaggatgccctcttcccttgcttttttggtctagggcctgtttggagctaactaggcttggctgagtccgggcaagaccttcttccgaggcatggacaagccccagagaacatgcagaacattgacctttccattgactgtctttcaagcagccagtgaaatcactaagtggggttcttccatgacatattttgttaatatgggtttcactttttccaagaatagtcccttgttgccacaatgttgatttactttacacaatgacagtatgtattaatttgtaattaaacccatccagattgttttagccttttcccaatggggtgggggagggaagaaggatattaaaataagttttaagaagcaaaaaaaaa

SEQ ID NO: 219 - DNA, 353 bp, Homo sapiens
ggctacagtgaccagtatattgtacccagccatcacaaagtatgaaaaaagattgcaaaataatacatacccagtatctgatgactccatcctctcttcagatagttcaagtttctgtagcacgtgcagtgaagactttacatatagaagctacacatctgcaacaactaaaacatttcaggcagaaccctgtgcatttgtagttgacacgtcagtaaggagaccaaccacacctataaaacctcctcctgcacatgtggaaaaaacagttgtggggaaaacatgtcacataaaaggacaatctataatctctaaacataaatataataaaaccaacttgctatattcataaa

SEQ ID NO: 220 - DNA, 192 bp, Homo sapiens
  SITE (187): n equals a,t,g, or c
ccttttaaaaatgttaatcatcttagatggaactttttaaggcagatgacaaaacttacttagcttattaaattgagtgcattactatttaataatgtctggwtgaatcaacgtaaatattatgaagataaaatattttatatacaaggcgtaattcagtgaatctacaggttcagctaatatggtnagtac

SEQ ID NO: 221 - DNA, 460 bp, Homo sapiens
  SITE (430): n equals a,t,g, or c
aaattacaaggatgtaggtgttgttatgagaagtgtacaaagggaaaaaggataaccaaatgtgtagcggctaaaagaatttgaaaactccaaccgtaagagacttttttccatgacttaatgaggctttcttaagtacacattcagatgctacggaaattcccacttccagattagggaatttttgtatcttcaatttttttttttttcttattgtctgctttagtagagttttccctctagcttcatttgggaaaatttcatcttcactgtactttccttcccaagatgcaattatgttgacaatttagtgatttatttgaarggtgttctgaccagttatggggtcacatttgaaaagcatctgtgttaacagcttggacatatggaaaatacaggcaaaacaggacaagctttggatgctgtcttnggccagccttatctccagttttatggggcc

SEQ ID NO: 222 - DNA, 837 bp, Homo sapiens
ggcacgaggtcagagtgaatgtaatttgacatcagttgaataaaatgaagcaaaatatcataatctttggtttattactgtgkatttggtaatcctggaaattgatacaatttgsattttagtttaagtgcatgttatttragtaacatttaagttttataagatcatggaattaaccattttttcgtatttttcaattagaaaaattttgtatttttacaattagaaaagtgtaattttttattagtatgcaacagatatgacacagctaggctaaatcaaattattacatatagtccaaaatttagatgattatactgaatattagtattcacttactgtactactgaagagtcaacatttcaaagctaatgatgaaaattatctactaagtgtgtgactttttccccaagaatgatttcatckgcttcmaccaatttcagtattctagttgatagagtcaaaatcatagcatgcggaagcagcacaagatatcatgtgcaacatgtgttgtgccaagtcagtaaacagccatcgtaggagtggccagcgtggccttataccttactagaacccagagaaaaaagagcctgctttttaaagagaaaggcaaaattgcttctggcctccatttcccactctttgtttctcatgggaagaagcaagaattccagaatcgtgtgaaattttcatggttttatgaaatcattctctgagtcattaaaatgtatgctaagaaaaaaaatctaacttatgctttatgctcagatgcaattttaatagtctcaaactaagataaacaaatatcccagcacacttttttaattataaaaaaaa

SEQ ID NO: 223 - DNA, 396 bp, Homo sapiens
  SITE (378): n equals a,t,g, or c
  SITE (379): n equals a,t,g, or c
atgttatttcataagtagtataattcactgtgacttctagtaaatgttagaaaataagactaggtgaagtgtagtgttaatgaaacttccttttgcatatagaagagtttaattattagagattattaatgaaaaataggttttgaaattcaattttccatctttaaagtctggttttgagtaaagtaggttagcttcataaaactaatatctagaattttaaaaatacaaataattgaaatcattgcatttgtgaaattttcattcaacagttttatattaaaatgtaactcctgaacatctggtgttttatcaggtattatggaagtgaagtaaacatcacagaccctggtttcaatctgtctraaatcttatttnngaaaaaaaaaaaaaaac

SEQ ID NO: 224 - DNA, 453 bp, Homo sapiens
tacatatgtattcagttgcatgctgcttgcgatgttattgcagggtgacatatggtactgactcaattagaatgaaactagcattagataacccttctgattacatgcatcctgaccggctcctcctcggcctcccctctgtgctctcgctctccagtgtctggaggccgcagattttcattatctctgccacatcggatgcasgatgggggtgggaragggaggggcctgtggatctctgggaaagaaagcggatcakacagacagactgctgtgaaagggttggtggggaaraatagagaggcctctgtgcttgcatttggaattaacatttacaattatattttttggaagtggttgtcaggcctactctgaaaaggggctggaaaggtctctctagagttgtgaagcaacggctgcatgtgattagtcagtccttaccttgaaatgatt

SEQ ID NO: 225 - DNA, 486 bp, Homo sapiens
  SITE (448): n equals a,t,g, or c
  SITE (455): n equals a,t,g, or c
  SITE (460): n equals a,t,g, or c
gttgctatatgatttttttcttatagctgtcacaagatgaaggtagaggcacattatacaaatacagacctgaagaagtagatattgatgtaagtattagtatgatatatgtggtcagtactctgtcgtattctccgccaaaaacactggaaataagcatgaccaaaaaacttctttctcccaagtcctccaaagtgacatcaggtaaattcatattttatgtgtgtgctctaaattattattccctgccctctacgtcccactgctccctattgttagcagtccaacgttattaagcatcacttaaatgaaagttaaaaactgtttcctgatttttagaagtttaccagaattggcttggacacggtggggccccacacccttttaatcccccagcacttttgggaaagcccgaaggcgggcggatccagtttttgaaggccagganttttttngaaanaaccccagcccctggggcaaccatta

SEQ ID NO: 226 - DNA, 438 bp, Homo sapiens
gcaaaaaaaagctttccccaactaaagtcctcttccaatgccttccctgaagcccactttaaaatactgcacatctcccttaatcccacagggagactgaagatctctgggatttcaaaaggatgtacagcctttggagagaaagcaaagccctataagtgactatgattagaatcaactcgtgataaaacccaactggccagcctcaagggaggccctctgcaacctgccgcaccccacctgtccagccacggcctgtcactccctagcctatgtttcccatctgtcaataagtggccagttaggccagatagctttagartctcacagacatgggttcaaattctaactttgcccctactagctgtctgactatggacaartcacttarttttctttaaatgctcctatttttaaaaaaaaaaaaaaaaaacccag

SEQ ID NO: 227 - DNA, 526 bp, Homo sapiens
  SITE (127): n equals a,t,g, or c
  SITE (414): n equals a,t,g, or c
gctgggattataggtgcgagccactgtgcctggtccccaaagtaatttttttattgtccggcttctcatctgtttcccagagttttcccattcactaggtcatttaattcttaaacaaatctaggtnaggtggatagtgacaaatcaactgtggtgagtacttgtatcacgacatactaagtttagtttcctgatattcaaagtagaaatattccacctmcctctcaagactgctgcacgaattggttgactcagttcttaagccatggaacttgctctactgtgagagcactgtggaaagagcaactgaccctgagtagtaggattggaggagggaaggaggtcagcaacagggaactcatagtggaaagcaagacttgtaagggcagagtgagaatgtgggaggacattccnggaagaagaaactggatagtcgagagcccagagttgagacacactgggaaagtagggaattacagattccttagtcgacctccagaattagaaatcaagtctatgtaagctt

SEQ ID NO: 228 - DNA, 191 bp, Homo sapiens
gacggctgcctacaagtgtacataggtatctgcctgtccccctaactgggcatcagctccaggccagcagggctttcccctctctttcagtcactgccgtgtcctcgcctaagagagtgtctggcacacagtaggtgctcagtgagttactcattgattaaaaagcctggaaaaccaggctgtgtcgtgaa

SEQ ID NO: 229 - DNA, 484 bp, Homo sapiens
  SITE (5): n equals a,t,g, or c
  SITE (475): n equals a,t,g, or c
ggcangtaaaatagacargggagttaatccagtctttgcctakgtatgaccgtgggtaagttaaycttactatacttcagcttcatcatttataaaatgagaaattaatagtactaatcacagagattgataaaagaattaattgacmgtgagatatttagcacgctgcctggagtttagaaagcatccaataaatgttatcttttccatgagttaggattttttttattataatagaaaacccaattcaaacttgcctacagagtaaaaagaawtgacttttgtcacagctgaaaagtctagcaktagaatgaactttaggtwttgtttgatcagggtaccatgctttcagacctggtcttgctgatgtgttggctttatcttcagctggtttcttccctcacaatagcagataatcacagcagtttcaggccttatatccacacatccagaaagaaagaatttctcatatccnccaactatc

SEQ ID NO: 230 - DNA, 476 bp, Homo sapiens
gtgttacatgtatttagcacattatggagaaaatagagtgataacttgagttctagtgagctccaaagggatggaatgatatgtaaaaatcaccagagatttgtttaagccatactgagcctttctataatgagacctaaatagaataaggtactgggtaatgaatgtttcccaaattatggcatgaatgtttaaggactatttcattttaagagatgcagtgtccagaaattgtcaccatggtagtagtttttaaaatgtgttcctcagarctgattggctccaggagtgtgtaactcaggagtgtyatctaccatctgtttatctatctagttaactatctattgtaragamggttgtggtggagtaaaccaaacaggcagcttgggattcatttgttggggatctgcamaagatattgttagaaaatagtttgggctgctaaaaaaaaaaaaaaaaaaaaaaaaaaaaccccc

SEQ ID NO: 231 - DNA, 417 bp, Homo sapiens
  SITE (319): n equals a,t,g, or c
aatttctgttcttcttttctgtttcccaccttgccctgcccctgaactccttgctgcacagagcttttgtctcctggtgtgcagaggttgtcgtacctgcgcaccagcagcctcagccccacccacagcgactcccgccccaacccccctttccgacaccacttcattccccatatcaaaggtaaggaggcaggtttctccaggcagcaccctgcatatggagatttattagcaccctgggaaggctaataaggtgtatctccaagakttagtgccgarcttttgagctctcagcatgcctgcgtgtgtcatgactatncccaacagttgtcttagaacgggcatagcatctctcattgggagaaatatgtcacttctaagggctctagatgaagaagcaggaagtatgtttaagac

SEQ ID NO: 232 - DNA, 487 bp, Homo sapiens
ccaggctctgctgccaccgagtccctagccccaactcaacaaacctgaaagccttcacagcagtgaractgcaatgttggagggcttcatctcgggctgcaaggaccctgggaaagttccagaactccacgtccttgtctcaattgtgccatcaactttcagagctatcatgagccaacctcaccccacagggcctcagtcgccaccatgtgggcctctccagtgcaaaccaccgagcattccaccatgaccggtcacagctacaaatccagagaccatcaatcctgctagagtgcatggtggcaagcacccaagggtggctgaccaagactgcagagtctcctccatctgcaggtccattcagcctcctggcatttaactaccagcatccagtgggccccaaggaatcccttcctagcctcctgacatgagtctgctggaaagagcatccagaacaaacaagtaataaataaataaataaactcaa

SEQ ID NO: 233 - DNA, 466 bp, Homo sapiens
  SITE (11): n equals a,t,g, or c
cagactattgntatccggtggtgacagccggatgctcctgttgccttgcgtcatcagcaggtaatctggggaggttcactggtaccttgtgaatattctgtttcctgtcagcctttcacctaatggtcttagcatccctaaatcattatttcatcagggatgtcaaagatgatttccatattctgtgattcttttcacatgtattagcgggcattctgtaaagaaacttcttatcatcaataagagaacatcatagattcttctaaaaaagcagggtcaatgtttcattctgtcctttatccatttgaaaggaagatagtcacctatagttgtggaaatcagtgttttcctttcactcctctgcttctttccctccatccttcctttgtgaatcactgtgtgccaactgactattcattgtgtttgttagtcacagtcatggggtttttctggccttttttttttt

SEQ ID NO: 234 - DNA, 341 bp, Homo sapiens
  SITE (39): n equals a,t,g, or c
  SITE (69): n equals a,t,g, or c
  SITE (77): n equals a,t,g, or c
  SITE (341): n equals a,t,g, or c
aaacagccggggccccagaagcagcccagctgaatgggncccaaggcatgaagactgaaaacctcgtcnggtgactnggatcttcatccccaggttgagaatctctagcttaggagtctcttttgagtcctaaaggaaatactcaatttcccccatctgtcaggtccctgccacatctaccgacatgtgcaatgggattaattcttaagaaattcatatacagcttagaytgttgctcagagactcctgccactctgtgaaccacscctatggacactgatgcacaatttcctttgggttgatctcataagttgcatttccaaaaaaaaaaaaaaaaaaan

SEQ ID NO: 235 - DNA, 624 bp, Homo sapiens
acccacatcatagaaggagccatattgtaaagaagtcaaatgcagacttaaataattagaaaccttctgccagcgtgtttttctggcactccttctgtgtcgtcttccttatcgtctggtactggttcagaagcacttgtctccatcacgtcatcttctgttaattcctctagtgtgttatctattagctctgaatttctccaaggtgtatatcttgaaagccttcactcaccacccttttttccgtgttcaygatctctttcgtgatttccttggttggctgtattgtaaatcctgtcaagtcatgcacaacatctggacacagtttcctccagcaggggagtgtgttgtgttgggcytgatgctttcacagctttttgtgtaacgatggcatcttcagtgctgtgatccttccagactttcatgatgttctatcagggttctcttgcatagtgttagataatcctttccataaagtactgtgtgtaatgagccttaatggtccttatgactccctgatctagaggatgatttagagatgttatgtctgggggcaaatagaccactttgacaccttcagtattgaactcatggggtcagggacattgtccaatcaaaaaaaaa

SEQ ID NO: 236 - DNA, 348 bp, Homo sapiens
  SITE (280): n equals a,t,g, or c
  SITE (345): n equals a,t,g, or c
aattcggcacgagcaaagtcggaagttacttccttggggaccgagagcccacaggggtcttcctactgcttcttctacccctgtatttcactcagctctctaaatttgtctcagctccaggaaggcagggatttcaacctgggcaacaagtccacagaacatgagatttctgaaggtgtgtgggatacatcatggttacataaaaatcctttcamtatagttcctgcttycctatcttcaaaatgattccctgaaggcttccgccatgacggtctaaagnctaacctctgaactgtggatggaaattgaactccttgatgtgatctctgcacatcatgcaacctnaac

SEQ ID NO: 237 - DNA, 274 bp, Homo sapiens
  SITE (201): n equals a,t,g, or c
  SITE (274): n equals a,t,g, or c
aattcggcacgagcccatatggccacaccagacatttctatcatgtgacccttatgggattcaatgatcttgaaatcctttagtttgaccaggtgcggtggctcacgcctgtaatctcagcattttggggcggcgaggcaggtagattgcttgagctcatgagttccagactggcctgggcaacatggtgaaacccatctntaccaaaaagacaaaaattagccgagtgtggtggcatgtgcctgtagtcccagctacttgggaggctgccgtn

SEQ ID NO: 238 - DNA, 584 bp, Homo sapiens
  SITE (299): n equals a,t,g, or c
agattctggtgaaagagacagtcataaactatcaatccacacagtagaataagtgttacaacagagttatatacagggtggtctgagtacatagtttctcatgctggtgttccaggtagtataattttctgaaattaaagctggtaagaatcaacataccggggatgtgattaaccattcccaaatctcagaaagacattagcctaaacctgtaaggagtgtaagataagcccgtgctctagttaattgtaacctgagggcatgtgctggtgatagataatgtgatggctgataaagantattgaaaaccagagccacgggaatgtgtcatggcccctttccattagggggagtgcagccccatgccaaatgaatggtcccagctctctagccacaggtggctctgaagatttctagccacagacacccctggacaacacagtgagacctctctagccacagatagccctggagccctgaagtkgagaagggcacactgttctgcttcttccatgtacagcctgttcttccagctttgcaaaatgctctgattaaattaggagaaccattttaaaaattgaccg

SEQ ID NO: 239 - DNA, 455 bp, Homo sapiens
caggtgtttatctctcggcagcagccaattaccaccttgcactcatgcagggcccagagtgcagatgggcttctccaggtaatcctgctccaccctcaacccttggcatgtcctgcatggctatgttaccatgsggcctctctcaggccctgtcccactccacatcattctcatgagcatccagtggaggactgtaggaagaaactgagggtacaggttacccttgtgtctggggctcccagtaaactgccactctagmtaatgctcagccattaagatttcattaagatactagtcattttctccttatctacttttgcggcaactacctattcctctgtgstctgtcaaacatgaaacagwtcatgtgtttcatccakcaaagrtwatgtgttctagttacctccagaaaccagtttgcttggtggcctgtgaccccagctctccagtaggct

SEQ ID NO: 240 - DNA, 128 bp, Homo sapiens
  SITE (117): n equals a,t,g, or c
aagcttgcctaacatgtattttctctgtaagaacatcaaagccttctaggaactctagacagtacaatgttctgggaccattttaaagcaacataaagcaaaaaaaaaaaaaaaaanctcgggggggg

SEQ ID NO: 241 - DNA, 621 bp, Homo sapiens
  SITE (43): n equals a,t,g, or c
  SITE (616): n equals a,t,g, or c
  SITE (617): n equals a,t,g, or c
ctggactgtgtgatttactttggcagaagtgccagtgccagtnctgaatctaggccttaagggtatcacatatgtccacttatccctcttgtacttcttccatccccaggagaagaatgtgtctctggtagccaattgatccaaaaaggatctgacattttcagatgtggaaccaaggccagccaagcccagccaagcccagcatagatccgatccgccaaagcccaactgtcttacagatgtataaactggaataaatgttgctttatacttagtttggggtggtttactacacagcattattatggctatgctgactagcacactatgttaccaacacattggaaaaaacagaatmtgcacataatttttctgaaaaatattttggcraaatagtcccaagaagaagtagaaaatctgaacaaataaattaacacaaaagaaaaattaatgccaagttctgccaccaccaaatgacatgttctactatgtcttcaaaaagacagattattcttgtcctatataaactattacagaacaggaaaaatggtgagaaatgatccaattcatttttttaaaaaggtagcataacattggtagcaatgccagactagannagaa

SEQ ID NO: 242 - DNA, 572 bp, Homo sapiens
  SITE (542): n equals a,t,g, or c
agaagttgagtgtttaagactgctgtttcaaggagaattctagcctcaggacaaaagttcaggactcatcagctgagaaatggcactgaaaattatgtaaatggataagctcagctagtaaacaagtccagagagagcagaaagtccagagatagcagcactgggctatgcacctggcctaatgccgccccgctcctcccaatccctgtgttatgctggagagggtccagcctctggtgagtttcaccaaacccccacatctctttcttctgagaccttctctaaaatcctctcttttatacttagtgaaatgggatgctctttttcctatccagcttaagcaaaaacttttgactatgagaagaatgaggatgcatttatgtatctgttctgcatggctaattccatcaaagatttctcattattcatgcctggcagtctcattttcttcttttgcctctaagagcacagtcgtagccttaattactgaccttttcactcttctaataccagcgatttcccccatctcagttctcaggaanttctgttcgcagaattatctcctgaatcct

SEQ ID NO: 243 - DNA, 685 bp, Homo sapiens
gcgtccgccagtattagacctgggttctgtctgttccgagcctgtgctccctctgccaaaccaatcccttgataatgctacatacgttgttttgagttctgttgtttttcacttaatgtatcaaaagcatttcactgtgtttctataatattcatgataatctttttaaatgactacatgattttttacctcatgctgacgtactctaatgtaaaccagtccctgaaaagttgaatgtttatttctaatttctttgatgttggaaatcgagtggtgagttctgaaactccctcttgtcccctaaaaggagcagctggcctggtgcagatgtagcctttggagggtctccatgttgtttggggaatgtgtctccctgtgtcagggaaggctcatagaaggagagcttggattcttatccttgaccctctggcttctggttcaagacatacttctttgctgggcccttcagaaacccctcatcttcccctcttcctcagggagagccaaaatcatctgccaggtctctttttacccaccagtttgatcgtcttactccctagtcccaaatccattctctatgcttaaaatccttcctgccttccctcttccaagtcttctctaccccctctagagccaaaaaaaaaaaaaaaaaaaaaaaaaaaaaaaaaaaaaaaaaaaaaaaaaa

SEQ ID NO: 244 - DNA, 531 bp, Homo sapiens
  SITE (154): n equals a,t,g, or c
  SITE (450): n equals a,t,g, or c
gaattcggcacgagctttgtctcgctaatgatttcaattagaaggttatagtttgagattttcaaatatggtatcccttgttctatttgctttgactctttttttggacagctttcctcagatttctggtttcttgattttctacttcttattnactaaaatttactaacwaggaattttgtgttagtggacaaaatttcattatagggtaattagaaaatgagttgacagttcattgggggaattccaaaatataaatatgtgaaaatattttaaatctttcattcttcttttcaagcgtggaagtggagtggtggtaaaatatgctgatcttctgggagctgggtgggagagtgactctcaacacaccagcattcagtgtgaagacatcctagactgtcacagtccgctggaattctcccatgcaaatatcccctctgttttcatacnctggcctttattcctgcctttttttaatgttgtttgtccagactttctttargtcagtttctccagagagtaaacatttga

SEQ ID NO: 245 - protein, 51 aa, Homo sapiens
  SITE (18): Xaa equals any of the naturally occurring L-amino acids
GVVFMSGRRSKLCVSHFXSQHLILKGEARGRVAHYVTPTNTLPDKCSWHCH

SEQ ID NO: 246 - protein, 52 aa, Homo sapiens
FFHLPVSFLFSRTSILEEQEYGLSFESDISQQIQNICSSGAVFREKAIDPSS

SEQ ID NO: 247 - protein, 33 aa, Homo sapiens
EPLCSSLGNTARPHLLKGLKKRIKTVAFSHRVF

SEQ ID NO: 248 - protein, 86 aa, Homo sapiens
FTIRVLPQFEPFDVLCVHVFLSHTCHSGTDFVLTLFWFMMLYFDYFTIIANVNKHLWDSQIITYDSWTLQLFDTDAFLAFSKDTVC

SEQ ID NO: 249 - protein, 106 aa, Homo sapiens
  SITE (68): Xaa equals any of the naturally occurring L-amino acids
  SITE (83): Xaa equals any of the naturally occurring L-amino acids
  SITE (91): Xaa equals any of the naturally occurring L-amino acids
YKLRCAHGLACAPSWALQPTPRVTLCRPKTNGTRDLLGQCRPKLRLGPPEAKMETDLDMLPGQLWWQXPFSMPHFSGRIFRHXPSGREGEXSGITLNVLPVTSFKQ

SEQ ID NO: 250 - protein, 82 aa, Homo sapiens
YPAQLENPSARPCIFKSLCLFSKFYKSDIQFRKRTTTLCAYNFSLAGFEFFSQWTMQWWPNVKSMKSKKTMFGFEMLFGTYN

SEQ ID NO: 251 - protein, 29 aa, Homo sapiens
RDRRTIEVEGYIEGKVKIVLALEDRKVGL

SEQ ID NO: 252 - protein, 51 aa, Homo sapiens
  SITE (43): Xaa equals any of the naturally occurring L-amino acids
TSRSCHIMTGCHGNHCHFFSVLRSDQSKPSPPALNLSWTVVLXYGEPVTLK

SEQ ID NO: 253 - protein, 93 aa, Homo sapiens
APSTLLQLRIRTLEAPATESGQCLTKSPFPLDDCHSFIPGLPASGPALLWPIRYTREKKLISYSTTFILFSVLLKNLQWLPSAFKNKVVFSLT

SEQ ID NO: 254 - protein, 103 aa, Homo sapiens
  SITE (21): Xaa equals any of the naturally occurring L-amino acids
  SITE (94): Xaa equals any of the naturally occurring L-amino acids
PQGTEFLSPSQNASLLFLNYXIFVSSIILILPKLLFYQYLYINRCLYFLFYFYFFFLETGRVLTLSPRLGMQLCNHSSLLTLNSWAQSHPPIPXTPGGLKREK

SEQ ID NO: 255 - protein, 90 aa, Homo sapiens
  SITE (82): Xaa equals any of the naturally occurring L-amino acids
DRAGVAAALAAEVWPPVALPLASAPWPCVPLSTPPPSPQPALLPPPCPNNWPLHTPLPPSASPTSPCPGLPRPSLFQVLVKXPSKLPVLG

SEQ ID NO: 256 - protein, 39 aa, Homo sapiens
  SITE (8): Xaa equals any of the naturally occurring L-amino acids
RVLNFWKXRHLLSNTTKNSGRSYKSLSITSENSIYFLKA

SEQ ID NO: 257 - protein, 88 aa, Homo sapiens
  SITE (33): Xaa equals any of the naturally occurring L-amino acids
  SITE (86): Xaa equals any of the naturally occurring L-amino acids
RPELGSPWYQQRAKGLQHRREGSPWRPVRAATXSAFMRKVPSRFNAALGTLVLARKECPRANYQQVVFPACKHTPSPGTATNSLVXGA

SEQ ID NO: 258 - protein, 45 aa, Homo sapiens
  SITE (20): Xaa equals any of the naturally occurring L-amino acids
NIGIIKWGQGNFHKIKRNIXEIKSMLESKVLIYSFNLLFSSFIEV

SEQ ID NO: 259 - protein, 50 aa, Homo sapiens
TNSNPFYPDNVCFGCGWHDDPVEHPHVMPSEQRHVVVWRSGMMSGLTMGI

SEQ ID NO: 260 - protein, 57 aa, Homo sapiens
WIPRAAGIRHELDLSFPTLALVMGTGNWDTQHLPWSSSGCCEESEWKVMKQVSLPPL

SEQ ID NO: 261 - protein, 52 aa, Homo sapiens
  SITE (46): Xaa equals any of the naturally occurring L-amino acids
PVVLEDQAGSTQLLFTFSIDRHKVEFIYFLLYQKSALASGITGAWXLSLRHL

SEQ ID NO: 262 - protein, 71 aa, Homo sapiens
  SITE (1): Xaa equals any of the naturally occurring L-amino acids
  SITE (2): Xaa equals any of the naturally occurring L-amino acids
XXFGFVLKKKKEFKSRISGFNQTTLPKVQLPLYYQYCIKLPGNIYKDFNSKVTILTFTCDHHHLRQMKDFS

SEQ ID NO: 263 - protein, 54 aa, Homo sapiens
  SITE (28): Xaa equals any of the naturally occurring L-amino acids
  SITE (33): Xaa equals any of the naturally occurring L-amino acids
SVSLFHSLWHIYLWNTLSVLQSTGIVAXKMVIXNYFLFINLLIPEKNKVTTIFP

SEQ ID NO: 264 - protein, 67 aa, Homo sapiens
SSYIGIFLTKFTMPYFKSLPLGNSHLSLTVASSYLQSNNVPSVLVNSILLFRKFIFKVLCIYGQIYK

SEQ ID NO: 265 - protein, 57 aa, Homo sapiens
  SITE (33): Xaa equals any of the naturally occurring L-amino acids
  SITE (38): Xaa equals any of the naturally occurring L-amino acids
GGCYWHGEARDAAKLRLTAKNYLAPSASSSTCXEKPPXMEMQKTRPGHGMFLCFMFT

SEQ ID NO: 266 - protein, 69 aa, Homo sapiens
  SITE (3): Xaa equals any of the naturally occurring L-amino acids
SSXIFCSSSVCLAHTVFLHVKKWFLVLVLFCFLRQGLGLSRRLECICVITAHSSFSLPAAREAEAGEWC

SEQ ID NO: 267 - protein, 69 aa, Homo sapiens
  SITE (51): Xaa equals any of the naturally occurring L-amino acids
  SITE (64): Xaa equals any of the naturally occurring L-amino acids
  SITE (68): Xaa equals any of the naturally occurring L-amino acids
YVIFVTISIYIYIFFETEFCSCRSGWIAMARSQFTATSAPAGRIASTQEAXVCSQPKFMPLHSXLGNXN

SEQ ID NO: 268 - protein, 43 aa, Homo sapiens
SQARALTLIDLFGDYYNCNIFLNVTVFWAVDFSDCQAMALNLL

SEQ ID NO: 269 - protein, 42 aa, Homo sapiens
HLLTPKMFTLYEVHVHIVQYSYYVCREKLESYHLNVHKIIIN

SEQ ID NO: 270 - protein, 96 aa, Homo sapiens
TEAAIYQPSVILNPRALQPSTAYYPAGTQLFMNYTAYYPSPPGSPNSLGYFPTAANLSGVPPQPGTVVRMQGLAYNTGVKEILNFFQGYQCLKDVW

SEQ ID NO: 271 - protein, 47 aa, Homo sapiens
  SITE (24): Xaa equals any of the naturally occurring L-amino acids
  SITE (29): Xaa equals any of the naturally occurring L-amino acids
  SITE (39): Xaa equals any of the naturally occurring L-amino acids
TFIGLLGKSYSLKMRGRSSCHTHXQLNMXMDILMLNKYXHFVNYLSY

SEQ ID NO: 272 - protein, 51 aa, Homo sapiens
LPKSHSFLLYLPINLGLTSFFSILGNVVIELMKNSSNNYCPPQPLTPSELS

SEQ ID NO: 273 - protein, 77 aa, Homo sapiens
  SITE (16): Xaa equals any of the naturally occurring L-amino acids
  SITE (77): Xaa equals any of the naturally occurring L-amino acids
AAGLRPDSPSPGWPRXHLWEQLLPWPARLAHLSRADLHETLLFCGFIIYDTHSLMHKLSPEEYVLAAISLLLGISSX

SEQ ID NO: 274 - protein, 64 aa, Homo sapiens
  SITE (16): Xaa equals any of the naturally occurring L-amino acids
IRQSALCLFFSVSLSXYVSVSPFPILSYNLFVEDTEPFAVFCFFHSLNLVIFPKCSFIPLFPVN

SEQ ID NO: 275 - protein, 72 aa, Homo sapiens
  SITE (33): Xaa equals any of the naturally occurring L-amino acids
QVFPALTPKRWTQVRRGTATVGGMAILQVTAGXPLAMAQVTHPLVHITEEVEENRTQDGKPERIAQLTWNEA

SEQ ID NO: 276 - protein, 47 aa, Homo sapiens
  SITE (41): Xaa equals any of the naturally occurring L-amino acids
  SITE (44): Xaa equals any of the naturally occurring L-amino acids
GHETYKLFMGRKSLGDFWEANTCMASGDSIRNLRLRSKKTXCFXLFD

SEQ ID NO: 277 - protein, 57 aa, Homo sapiens
LCLPTKSFAGVLRPVELRKFPSSQIFTQEWIQYLPSQTPTYSGLGWLPLICYTSRIF

SEQ ID NO: 278 - protein, 52 aa, Homo sapiens
ELVDFFMNCIPLVPKCPNQIDCILKNYCISKIKKQIASPDLFCISNGTKLFL

SEQ ID NO: 279 - protein, 144 aa, Homo sapiens
  SITE (82): Xaa equals any of the naturally occurring L-amino acids
  SITE (96): Xaa equals any of the naturally occurring L-amino acids
  SITE (110): Xaa equals any of the naturally occurring L-amino acids
  SITE (111): Xaa equals any of the naturally occurring L-amino acids
  SITE (113): Xaa equals any of the naturally occurring L-amino acids
  SITE (118): Xaa equals any of the naturally occurring L-amino acids
  SITE (139): Xaa equals any of the naturally occurring L-amino acids
RHLGFVISFAEHRSCGSWVLRRPPLWRQHQSGRHPPGTHGNDCFCQDLLQRPSVYSHLPRELRGGRPDHHLLRRAEPQGGRXLRQNWEGSPSLLSXPPLPHLRLLLGVNXXPXRFMPXLLLGWSVACCFYLTLWSYLWXLTSWF

SEQ ID NO: 280 - protein, 92 aa, Homo sapiens
  SITE (51): Xaa equals any of the naturally occurring L-amino acids
  SITE (70): Xaa equals any of the naturally occurring L-amino acids
SPPQPNSRLPRQCGLSTLTACSWKTDLPTNQTAGFSFSPCKFLPHATSLPXKFSLLSPEPVQMFTLPSKXGSNLKISAPMGSSLIPAAGHIS

SEQ ID NO: 281 - protein, 50 aa, Homo sapiens
  SITE (1): Xaa equals any of the naturally occurring L-amino acids
  SITE (4): Xaa equals any of the naturally occurring L-amino acids
XFPXPHSSPPKKKKKEESHDTPEIAYVSLLLTAKGCVHYERLPCNVCYSE

SEQ ID NO: 282 - protein, 123 aa, Homo sapiens
  SITE (98): Xaa equals any of the naturally occurring L-amino acids
  SITE (99): Xaa equals any of the naturally occurring L-amino acids
  SITE (109): Xaa equals any of the naturally occurring L-amino acids
ENTRDLAKMRVRKDLLREIMLKPKLMSTQVKKLYIHKSKSWEKNVPGRGNCIFKDVEVGWSIFHLKKWNMYAIYIYFIWRKESKGEGGYVTRLERHAXXCCGKIGIIIXSTIICKSFYFQACS

SEQ ID NO: 283 - protein, 52 aa, Homo sapiens
  SITE (30): Xaa equals any of the naturally occurring L-amino acids
  SITE (44): Xaa equals any of the naturally occurring L-amino acids
  SITE (47): Xaa equals any of the naturally occurring L-amino acids
VILYPYICCAAISKSYFQQRLNYADYQIVXSNFIILCKLYIEEXLVXYIQRW

SEQ ID NO: 284 - protein, 68 aa, Homo sapiens
VFGHETAPSLYFSSCCPFKAGDAILLEPEKQNVSVFCEFPVIFTSGTHVQNQAESLPEHIFLGAGERK

SEQ ID NO: 285 - protein, 123 aa, Homo sapiens
  SITE (102): Xaa equals any of the naturally occurring L-amino acids
  SITE (105): Xaa equals any of the naturally occurring L-amino acids
  SITE (122): Xaa equals any of the naturally occurring L-amino acids
RVRALCGCGASFSVCTVTTTNTLLNVVGLGCCELRRYPGEAGHPGTRMTRGRLRVALSAPSCGGEDARVLAGPCAGERDRGALSLRPAASRAQVHIGELGTXATXASFWEVVLTSSCHGRTXQ

SEQ ID NO: 286 - protein, 269 aa, Homo sapiens
RTRGRDSIVAIGCFIMDGGDDGNLIIKKRFVSEAELDERRKRRQEEWEKVRKPEDPEECPEEVYDPRSLYERLQEQKDRKQQEYEEQFKFKNMVRGLDEDETNFLDEVSRQQELIEKQRREEELKELKEYRNNLKKVGISQENKKEVEKKLTVKPIETKNKFSQAKLLAGAVKHKSSESGNSVKRLKPDPEPDDKNQEPSSCKSLGNTSLSGPSIHCPSAAVCIGILPGLGAYSGSSDSESSSDSEGTINATGKIVSSIFRTNTFLEAP

SEQ ID NO: 287 - protein, 69 aa, Homo sapiens
LEVVPGEREPGRLIRAEGRERHGLRVKCTEVCSKCYFPSCPSCPWYSGTWHFFLEWGLSFSTLRAPEGS

SEQ ID NO: 288 - protein, 70 aa, Homo sapiens
KKKKEEGKAGWGGWGKEAGSADHSPSMSCFLKMLELGQAWWLTPVIPALWEAEAGRSLEVRSSRPAWPTW

SEQ ID NO: 289 - protein, 95 aa, Homo sapiens
  SITE (76): Xaa equals any of the naturally occurring L-amino acids
  SITE (78): Xaa equals any of the naturally occurring L-amino acids
WPYLELVKAPSGCVTKAKTSEAEQHSDPRPSPSVSRYGGPGQPGPSSFLWCILDTQLPSLELRWFQLLPSCLHSSXRXGKKGEGKGKCPSLFLKA

SEQ ID NO: 290 - protein, 63 aa, Homo sapiens
LKQRARTSNQSLGYLLSPHLPYSPLFSFDESQKNTLKYIAYFYSSKQPWYPNRRPSYLIFFLS

SEQ ID NO: 291 - protein, 51 aa, Homo sapiens
  SITE (47): Xaa equals any of the naturally occurring L-amino acids
EDAQRHQSLGKFKPKLQWDSTSYPLGWQLFKKRLTWAWWWVLYPALXGRRL

SEQ ID NO: 292 - protein, 41 aa, Homo sapiens
FNQTVLVYIEKFKNAENKRRKQHSLPYLFMVTTVNPIMLIF

SEQ ID NO: 293 - protein, 173 aa, Homo sapiens
  SITE (164): Xaa equals any of the naturally occurring L-amino acids
  SITE (170): Xaa equals any of the naturally occurring L-amino acids
SITQGESISEQGSTDNESCTNSELNSPLVRRTLPVLLLYSIKESDEKAGKIFSQMNNIMSKSLHDDGFTVPQIIEMELDSQEQLLLQDPPVTYIQQFADAAANLTSPDSEKWNSVFPKPGTLVQCLRLPKFAEEENLCIDSITPCADGIHLLVGLRTCPVESLXAIKSSXGLE

SEQ ID NO: 294 - protein, 44 aa, Homo sapiens
ASVSLGSPSLKLNLKEGLCIPVAHITSKCSLHLGSWKKSFSRFR

SEQ ID NO: 295 - protein, 58 aa, Homo sapiens
  SITE (25): Xaa equals any of the naturally occurring L-amino acids
DCLAQRKDVVGGMCACFTHVCVSPXCAHAQGNSTTRETPGNLILPHSLQGKLIGCWLV

SEQ ID NO: 296 - protein, 34 aa, Homo sapiens
  SITE (9): Xaa equals any of the naturally occurring L-amino acids
  SITE (11): Xaa equals any of the naturally occurring L-amino acids
ANYRKQFLXSXRIGRLNPIMSNSRVHAFNNVFPR

SEQ ID NO: 297 - protein, 112 aa, Homo sapiens
  SITE (45): Xaa equals any of the naturally occurring L-amino acids
  SITE (46): Xaa equals any of the naturally occurring L-amino acids
  SITE (49): Xaa equals any of the naturally occurring L-amino acids
  SITE (50): Xaa equals any of the naturally occurring L-amino acids
  SITE (52): Xaa equals any of the naturally occurring L-amino acids
TSTTSPPLRQLLVEQARLTVGQDGRRAGPSPASVHLPLPWGEPPXXCAXXAXPAACRPGRSQLPIKVACWPTTRRPRAQATLEELALLSGAPCPGSAVWPSGHRRRLPLALD

SEQ ID NO: 298 - protein, 46 aa, Homo sapiens
  SITE (1): Xaa equals any of the naturally occurring L-amino acids
XKLVRLQVPVRNSRVDPRVRFRSADIRMVFDESQYILCFLLSSYYC

SEQ ID NO: 299 - protein, 44 aa, Homo sapiens
  SITE (11): Xaa equals any of the naturally occurring L-amino acids
DGYTVHVCNTXLKNVKLTQVKQFKRKSQRTLMTQSLRRANLAAP

SEQ ID NO: 300 - protein, 51 aa, Homo sapiens
  SITE (20): Xaa equals any of the naturally occurring L-amino acids
  SITE (37): Xaa equals any of the naturally occurring L-amino acids
ILWHSFPQKEHNLGELISCXHNDLERVFYFLKFLMGXRPSASPYGSVILSC

SEQ ID NO: 301 - protein, 77 aa, Homo sapiens
  SITE (36): Xaa equals any of the naturally occurring L-amino acids
  SITE (37): Xaa equals any of the naturally occurring L-amino acids
  SITE (62): Xaa equals any of the naturally occurring L-amino acids
LKQILGWAWQLMPVTPALWEAKAGGLDCLKPEVQDXXGQHGETWSLQNKYRKYWVWWHVPVXREDGLSPGVPGCSEL

SEQ ID NO: 302 - protein, 59 aa, Homo sapiens
SVISRPAESVSPGNLLEIHTLRFHSRPTEFDVFQQSVCLTSLPDDSEACSSLGTTVTAH

SEQ ID NO: 303 - protein, 45 aa, Homo sapiens
VIIHTKACLPQWVLSSMWAGNVAIFHPCIPLCLAQCLAHSVCSEK

SEQ ID NO: 304 - protein, 104 aa, Homo sapiens
HSKTLSVLKIQKISWACWRTPAVPATREAEAGEWHEPRRWGLQWAEIAPLHSRLVDSARLRVKKKKKKSIDSILLRNPNVFVKVGIFHSFSISYSSLWFFFTFK

SEQ ID NO: 305 - protein, 78 aa, Homo sapiens
KINIMELTLFCLWGLAPAWATEQDSVSKKEKKMSLLQSQVSLALCHPSSVDGWLGSSCPVSAHSSSEVKVRKGRDGGT

SEQ ID NO: 306 - protein, 45 aa, Homo sapiens
  SITE (24): Xaa equals any of the naturally occurring L-amino acids
  SITE (28): Xaa equals any of the naturally occurring L-amino acids
  SITE (38): Xaa equals any of the naturally occurring L-amino acids
  SITE (44): Xaa equals any of the naturally occurring L-amino acids
IWMRIVQPGGLSSEITGLTRSTLXSQIXEGKTCQVHKXIAPSSXY

SEQ ID NO: 307 - protein, 61 aa, Homo sapiens
  SITE (52): Xaa equals any of the naturally occurring L-amino acids
GTCFLKCMVTYSFVLSFQDNSGNSLFSFTKKTFLHHLSFRSPMNSKNILADXREKVFNISD

SEQ ID NO: 308 - protein, 55 aa, Homo sapiens
  SITE (3): Xaa equals any of the naturally occurring L-amino acids
  SITE (44): Xaa equals any of the naturally occurring L-amino acids
  SITE (52): Xaa equals any of the naturally occurring L-amino acids
NIXILVFLEFSVPYNFSKLAIPQDIHCFLQILEYKIKHINLKSXYEMVFQEXLYF

SEQ ID NO: 309 - protein, 49 aa, Homo sapiens
  SITE (2): Xaa equals any of the naturally occurring L-amino acids
AXPWVLVAETGRGTGSPASCSGLTLSVVLPWLFAKSKGSRGRGLSLTGY

SEQ ID NO: 310 - protein, 137 aa, Homo sapiens
  SITE (50): Xaa equals any of the naturally occurring L-amino acids
  SITE (69): Xaa equals any of the naturally occurring L-amino acids
  SITE (118): Xaa equals any of the naturally occurring L-amino acids
  SITE (126): Xaa equals any of the naturally occurring L-amino acids
RRQVLSASDYGHSLHSRLPCLVSGTPRHPQTSLASASSRRFTIWQNTCAXGRLTDGRPCVRPTRLRSCXLTLPWSLPGLWMGVSGAWRRSAPTSCQCQPPACPASGLCGSTLSASGGXMWGQLGAXAHACHPKMLGL

SEQ ID NO: 311 - protein, 45 aa, Homo sapiens
  SITE (42): Xaa equals any of the naturally occurring L-amino acids
  SITE (43): Xaa equals any of the naturally occurring L-amino acids
QANRKAVKLYQRESLLYRGLNTLFEYNPKLKFLNFSKEPICXXNW

SEQ ID NO: 312 - protein, 94 aa, Homo sapiens
NGPESALGVLLLAPAAEARPAHRPVVRHRGHHGASQLLFSSRRQRPLVEAKSDRRGLASRHSSGSLLVQVLVLRAWPVGSSRWLLFNGPCSHQR

SEQ ID NO: 313 - protein, 29 aa, Homo sapiens
NVCNLLWSMSPLKNSALKSLILFIINSLF

SEQ ID NO: 314 - protein, 76 aa, Homo sapiens
QSSQSVLLGRHAPLKVGVSCLVRLNKSQSRQSSFCMMALLSSYGQTSRMMLEIMYLELDSNLIFFSECTRMLFLGV

SEQ ID NO: 315 - protein, 105 aa, Homo sapiens
QTVQGARQGLPAPGSSLSSPPPSPGPVLKSLAPLKLVMPGQMPPSCHCIPTTSNECPPPDGVTHLSSHLHRKASWTQPCEVRNRPNRVTRLEGVVVLEPRCLNSV

SEQ ID NO: 316 - protein, 90 aa, Homo sapiens
VVCTVMEIKMSLLKGLHFVGLEGPKTSFLGFLFTSGLLHYITSRERQAGLEAWQGEQFEKYYTVQKSKDNFNGNEDKLTSLTQSPSKINP

SEQ ID NO: 317 - protein, 44 aa, Homo sapiens
  SITE (2): Xaa equals any of the naturally occurring L-amino acids
  SITE (43): Xaa equals any of the naturally occurring L-amino acids
GXDVHRAAGNSFNKFRGPMAGLGAAQTTQLETCIGEKITFDPXT

SEQ ID NO: 318 - protein, 63 aa, Homo sapiens
  SITE (36): Xaa equals any of the naturally occurring L-amino acids
  SITE (53): Xaa equals any of the naturally occurring L-amino acids
HIGHSKLSLGWAQWLMPVIPALWEAEAGGSPKVRSXETKFGQHGETLSLLKIXKLAGHGGMCL

SEQ ID NO: 319 - protein, 127 aa, Homo sapiens
  SITE (92): Xaa equals any of the naturally occurring L-amino acids
  SITE (113): Xaa equals any of the naturally occurring L-amino acids
EHLSLWLAYFDATHHSTLRHLSPHFSHSWMTSPERWAVWLPPHGSWPLLMSWKAPGRVLGTPWQLTLGTQVGCWRCGVWRCVVLGKNSLRLXLGFCGGVFSPAYSELLKMGLXPRQGGLRTFASLGF

SEQ ID NO: 320 - protein, 66 aa, Homo sapiens
NPISTKNTKKLAGRGGGHLWSQLLGRLRQENGMNPGGGACSELRSCHCTPPGRRSEIPPQKKKRRV

SEQ ID NO: 321 - protein, 77 aa, Homo sapiens
  SITE (14): Xaa equals any of the naturally occurring L-amino acids
  SITE (47): Xaa equals any of the naturally occurring L-amino acids
  SITE (54): Xaa equals any of the naturally occurring L-amino acids
  SITE (63): Xaa equals any of the naturally occurring L-amino acids
HPSFTQCLPYARHXSEHLARVNSFSPHTIRRAPPSYGKGKYCIGRLXNFPVVTXQVSAGTSVXPNPIPIDLTLKYSN

SEQ ID NO: 322 - protein, 19 aa, Homo sapiens
RKLTNPKGKVVYLKEKKKK

SEQ ID NO: 323 - protein, 55 aa, Homo sapiens
QTEFLAARRDRFSFPEKAAVSVVESDSCFTAAKAMYYNMTLFLFPFTLVYLLAMD

SEQ ID NO: 324 - protein, 50 aa, Homo sapiens
AMIVPLHSSLGDRVRSCLKKKKKSPLNQQKDLMLMQWTFLGLFSCGFSSA

SEQ ID NO: 325 - protein, 25 aa, Homo sapiens
RVQRNRCGMALRTRQEEPYNLSLPL

SEQ ID NO: 326 - protein, 24 aa, Homo sapiens
  SITE (1): Xaa equals any of the naturally occurring L-amino acids
  SITE (3): Xaa equals any of the naturally occurring L-amino acids
XSXAVFLIHLMVVQSMKKFRKGDI

SEQ ID NO: 327 - protein, 99 aa, Homo sapiens
QWTLMAVPSWNLPDASQVSQLLDLALGPSSISAGGFWYSSLNTRGKMPIALGLGHHAYRHYSTLASCHQKTRGRLSSASSEDQLYPGSFLFLQGQTAFN

SEQ ID NO: 328 - protein, 48 aa, Homo sapiens
KLRRTFYVILKFTSFFRICKIFLPLTADIYMMLDPILGTYLCPVTLCL

SEQ ID NO: 329 - protein, 44 aa, Homo sapiens
MHWHCQFTISISKCLCMFAHFMCLSLHQPMTVDQYGINMGPHFE

SEQ ID NO: 330 - protein, 179 aa, Homo sapiens
LLRTGGFSQLLAQTNTSMLSSSPASCTSPSPDGENPCKKVHWASGRRRTSSTDSESKSHPDSSKIPRSRRPSRLTVKYDRGQLQRWLEMEQWVDAQVQELFQDQSNPFLSLRLTWKLSWIYPQRSRRLSWRPFLGTAPAPQRLLSLSCSVNSRNSGDSAGLRNKPERPSLAASALPGLP

SEQ ID NO: 331 - protein, 42 aa, Homo sapiens
  SITE (40): Xaa equals any of the naturally occurring L-amino acids
  SITE (41): Xaa equals any of the naturally occurring L-amino acids
SKCDNIIFIILSEDHSLSLLYSFNFPRLKSFHNENFWGQXXI

SEQ ID NO: 332 - protein, 55 aa, Homo sapiens
AVVFNFLSAASCVHFLLKVIGFCLSSKHKNLKGVLQIFCAVRWLFPSGSFFLNNN

SEQ ID NO: 333 - protein, 93 aa, Homo sapiens
SNSTLFCYSNCSTLAIESSFHWFLCSFVCLLLLSISCFPTLQDALGSSCIFPAPALESAVYPRSPDSFHWRMVLGNKGSRHWLCLLLLGCLCF

SEQ ID NO: 334 - protein, 38 aa, Homo sapiens
ATVPSPEIVLIACFSFLSEVCFLKSLWRWRRLTFSGLM

SEQ ID NO: 335 - protein, 70 aa, Homo sapiens
  SITE (41): Xaa equals any of the naturally occurring L-amino acids
  SITE (61): Xaa equals any of the naturally occurring L-amino acids
HAIVGGRGTQEALCPTGAPCQVLEQEHLKNQGQESIYPLRXLYREQGTENVVTEEIASKAXSQELNEVED

SEQ ID NO: 336 - protein, 61 aa, Homo sapiens
TNYFSVTAMTQVPISLKRVLWNCPILIRDGKRKSSHITRLILCLISNFNLKLWFSFLFTLK

SEQ ID NO: 337 - protein, 28 aa, Homo sapiens
  SITE (6): Xaa equals any of the naturally occurring L-amino acids
AESRCXMAVFSDPDMNQNHLEGLVNTNC

SEQ ID NO: 338 - protein, 133 aa, Homo sapiens
IRREGRSKCLTSDPHEPHGSLRAMSFGFRVAFSFGGWRVLLCSQGRKVGHIPAHLSRAWRGLSRMGILSGEGERTVAVRVPRKPPIPVWGVQIGSSSTAFTVAMVAAWLCKTQSFHPGKYVQEAGAGWSQRVV

SEQ ID NO: 339 - protein, 44 aa, Homo sapiens
AVLSELSGKMTFVERIKNLIHVLYFDFWFQMFDTRSGRSFTVKF

SEQ ID NO: 340 - protein, 75 aa, Homo sapiens
VILSSITSPFPGLLHFRSLIFFLFLSLSFLSSLSSPLLSLLLFSLSPSLSFVQSKDKILSTKALVLKLFGLRPHS

SEQ ID NO: 341 - protein, 58 aa, Homo sapiens
  SITE (50): Xaa equals any of the naturally occurring L-amino acids
  SITE (51): Xaa equals any of the naturally occurring L-amino acids
SINFLVSSYRITQNDMISLPWIYRNYFFFHIFLLNQLSCVISDTVILIIXXNSINGFI

SEQ ID NO: 342 - protein, 173 aa, Homo sapiens
  SITE (170): Xaa equals any of the naturally occurring L-amino acids
GRVGGRVGKTEETGKSQLLSNHQQQLQADSFKAKQMENHQLIKEAVEMKSVMDSMKQTGVDPTSRFKQDPDSRTWHHYVYQPKYLDQQKSEELDREKKLKEDSPRKTPNKESGVPSLPVSLTKKKKKGGRSRGSKLTYACMRRHSSSIVSPKFNSLAVVLQRRDWENPGXYPT

SEQ ID NO: 343 - protein, 43 aa, Homo sapiens
TLISVDFISCKTITFTTTHQSQTSLNGSLLKSHFSLNDMYRYK

SEQ ID NO: 344 - protein, 63 aa, Homo sapiens
  SITE (3): Xaa equals any of the naturally occurring L-amino acids
  SITE (29): Xaa equals any of the naturally occurring L-amino acids
FLXTFLYVYFLLNFLMLKNLIFKLYFDFXCFLTICLLFIEFINIAKFLHCQTMPKNSKKEMVQ

SEQ ID NO: 345 - protein, 116 aa, Homo sapiens
ACKRINMPLARDLLHPSLEEEKKKHKKKRLVQSPNSYFMDVKCPGCYKITTVFSHAQTVVLCVGCSTVLCQPTGGKARRQKGVHLEESNTNDSNSFLNFNFVLSHRKPYHKFHNSN

SEQ ID NO: 346 - protein, 66 aa, Homo sapiens
  SITE (52): Xaa equals any of the naturally occurring L-amino acids
  SITE (62): Xaa equals any of the naturally occurring L-amino acids
  SITE (63): Xaa equals any of the naturally occurring L-amino acids
TFYLDNREYYSRASVMAHTCNPSTFGRLKAGGSLELSKSRTSLGKHGETPSXPKLARAWGRXXWSP

SEQ ID NO: 347 - protein, 37 aa, Homo sapiens
SQISTLLYFKITLWKYHLNSVICQIYSTFFSLTFSIK

SEQ ID NO: 348 - protein, 158 aa, Homo sapiens
PSRYSRRPEELRILECVLKETFRLFPLFPLFARSVSEDCEVAGYRVLKGTEAVIIPYALHRDPRYFPNPEEFQPERFFPENAQGRHPYAYVPFSAGPRNCIGQKFAVMEEKTILSCILRHFWIESNQKREELGLEGQLILRPSNGIWIKLKRRNADER

SEQ ID NO: 349 - protein, 44 aa, Homo sapiens
HLELYIETQDVRQWYAGARYCECNSNSKLLNFSFVNREYLHHGI

SEQ ID NO: 350 - protein, 35 aa, Homo sapiens
CKELPFSIPPSPPLPSSPLLSYPQLKNSTSLMWET

SEQ ID NO: 351 - protein, 71 aa, Homo sapiens
  SITE (50): Xaa equals any of the naturally occurring L-amino acids
  SITE (52): Xaa equals any of the naturally occurring L-amino acids
  SITE (58): Xaa equals any of the naturally occurring L-amino acids
DVPSIIIAICLNEKENNFFKVRVIKNFREAVNFHWRKKMMKNYITEKLLXDXLIGASXGRGAFPSEIVFQG

SEQ ID NO: 352 - protein, 84 aa, Homo sapiens
EHSSFVKSNETPSAGIIFAALSVGANATVDGICPLQGFISVRHCCRRQEAVPGLMAMKRGSVFLFHPLLLWVGFITCVYFIITE

SEQ ID NO: 353 - protein, 95 aa, Homo sapiens
  SITE (83): Xaa equals any of the naturally occurring L-amino acids
LKTGSDPRCSVDSGVAAGRATRTLASSVSSRPLLMAPHRQAELHLRSPPAAAEERRARPRPGRNPHSLCAPACLKDKVYLQRXDAHIKDNETPKC

SEQ ID NO: 354 - protein, 59 aa, Homo sapiens
  SITE (14): Xaa equals any of the naturally occurring L-amino acids
GCHCFLYCVHEFHXLSHAGIGPWCHKDDENVRKTPFVSRVNPPFLSSFSAGPCVLSLIF

SEQ ID NO: 355 - protein, 108 aa, Homo sapiens
NLETILLYRLLLLLTCSGNWMWNWCNSLTAFCVKLYCDKKTMTYYFPYRKEKYFRLYCFFLWKIFNCTFYFTDSCIFHKENVVVIITFDISLQHLLLFSVNLSYMLNF

SEQ ID NO: 356 - protein, 33 aa, Homo sapiens
TVSKNLKYKIYFTKNYTEYNLTLGNPEYLSIFT

SEQ ID NO: 357 - protein, 49 aa, Homo sapiens
IFVFLVEMGFHHVAQAGLKLLNSSDLPSCLSKCWDYRCEPHCAWPYILF

SEQ ID NO: 358 - protein, 42 aa, Homo sapiens
  SITE (1): Xaa equals any of the naturally occurring L-amino acids
  SITE (12): Xaa equals any of the naturally occurring L-amino acids
XPGPTHASGMNXTLKFGSKNHRKHNCEYIIQLREWGKARLER

SEQ ID NO: 359 - protein, 36 aa, Homo sapiens
KKKTKKKKERKKKQPVIQFLKTFKVKLKSEIIYFKR

SEQ ID NO: 360 - protein, 66 aa, Homo sapiens
QRNTGLNLCYRLNRPNRHLQNMHPKTAEYTFFSSAAHGTFSRIDHILGHKQGLKIQKNLIMSSVFY

SEQ ID NO: 361 - protein, 57 aa, Homo sapiens
SGGLYSSENAGMSSENYVGIIMAENLRFLGEGSSAQGKPGAKARPRGVVDAHTVEIP

SEQ ID NO: 362 - protein, 48 aa, Homo sapiens
  SITE (17): Xaa equals any of the naturally occurring L-amino acids
  SITE (44): Xaa equals any of the naturally occurring L-amino acids
LKCLLFYFPQGLFYSHXIKCFSQESIEPILFSRENRSLAKETTXNTYI

SEQ ID NO: 363 - protein, 59 aa, Homo sapiens
  SITE (46): Xaa equals any of the naturally occurring L-amino acids
QLLMFSLYHQSFTCAVSCSWHVLSLLLPFSLHQDFAYVKYFFSFLXFFFFKQFSCSASE

SEQ ID NO: 364 - protein, 56 aa, Homo sapiens
NVFILIKRKQITSLGNVESILKKKKKKEKKEKKKSTFYIKKFRWLNCEFWQTFDVE

SEQ ID NO: 365 - protein, 58 aa, Homo sapiens
GKEMKVPFSLMPILLRPALLKMLVLLKLHNVSMTLFASEAGLIPRGTKTSQGWHLSWR

SEQ ID NO: 366 - protein, 65 aa, Homo sapiens
EDHLSPGVPGQPGQNRPHLKRKCKKLFLKMKEMKNSEIYRKFSKFHLEINLFSGLHYIAHYCIRD

SEQ ID NO: 367 - protein, 141 aa, Homo sapiens
  SITE (72): Xaa equals any of the naturally occurring L-amino acids
  SITE (74): Xaa equals any of the naturally occurring L-amino acids
  SITE (125): Xaa equals any of the naturally occurring L-amino acids
  SITE (129): Xaa equals any of the naturally occurring L-amino acids
CYVSSPRPPTSACASCVPTRCWAISWGRRCGTPRSPAGIITASRISASEAAVSATATRMPAMPKTPRTRSGXSXPARQHLRGHLRPLAAPASISSRGSLRLPTVPTSASPVTATAMPPTVTTTLXVDRXRASQSLDGTYQG

SEQ ID NO: 368 - protein, 49 aa, Homo sapiens
WYPSVRVDSKPDSITYFLAVYLWANYLTYLSFLSEKWGRSLTHYLRYFY

SEQ ID NO: 369 - protein, 66 aa, Homo sapiens
HSDWLKNLPRVRKPLTRQPASDPSRAPQAGVSKTWGMRRREASEKLSFQNLVTGSSVPRAFRTQEL

SEQ ID NO: 370 - protein, 90 aa, Homo sapiens
EGSGHPTLKSTQLLPPTCQAPTLEGPSPCPITATALTLLSAIAPLSICSALPYPPIWRASLRSLHDAGQGTCSESHFCVTERREWGWGET

SEQ ID NO: 371 - protein, 72 aa, Homo sapiens
TFFLIVLVVLVREGELGLILRLPQACLFFCVVLTRSLLHATDFSQWVFLVEEEVSQKYFADVWSCTTPGHPQ

SEQ ID NO: 372 - protein, 245 aa, Homo sapiens
  SITE (86): Xaa equals any of the naturally occurring L-amino acids
  SITE (94): Xaa equals any of the naturally occurring L-amino acids
  SITE (174): Xaa equals any of the naturally occurring L-amino acids
  SITE (223): Xaa equals any of the naturally occurring L-amino acids
  SITE (235): Xaa equals any of the naturally occurring L-amino acids
  SITE (237): Xaa equals any of the naturally occurring L-amino acids
HDAGTGTVFLFFIAVLGHTPEAVQIATGRNAARLCCVASRDAGLSWGSARDLTEEAIGGAVQDWATFAVGPGHGVQLPSGRLLVPXYTYRVDRXECFARSAGPALTPSPSTAMTTAAPGAVEPSCPTCAQASASWRRWTVGRPAASSTAMPGAHWAAVCRRSALTRAPPSCPQXAWLPCPRLPGAARASIVGFPAPGPNRPTGMTVWSSGAPGRSPSGLPIPXGPWKFQRKPPQXGXACFVKNPP

SEQ ID NO: 373 - protein, 82 aa, Homo sapiens
  SITE (59): Xaa equals any of the naturally occurring L-amino acids
  SITE (77): Xaa equals any of the naturally occurring L-amino acids
LLISADILLSASLVACQLFMCFLEKETFPKGRDFRGLVRQCPVIKASLEIGIPNISIMXLYAIKETKYYLFFTHCKXHWDPC

SEQ ID NO: 374 - protein, 90 aa, Homo sapiens
GASSFCGQRGTHPTVTTALTQATNWHPQHLSLHVSAQPAWVRNPTLSVSVHLQQAMVHPAWGLPHGGLQEHLLSECIKSPWLLHTELTVN

SEQ ID NO: 375 - protein, 52 aa, Homo sapiens
  SITE (35): Xaa equals any of the naturally occurring L-amino acids
SCEEPQEIPSSSLTDLKLSKVVLLTQKLGSDNHHXPIYKLKVNYQLNLDLSV

SEQ ID NO: 376 - protein, 60 aa, Homo sapiens
VAEADGSPEVRSLRPVWPTWGNLISAKNTKIGWAWWYVPVIPVTREADAGELLEPGRRRL

SEQ ID NO: 377 - protein, 15 aa, Homo sapiens
RMSDWMDSDIIETYL

SEQ ID NO: 378 - protein, 75 aa, Homo sapiens
NKREALCPQGLTWMDCQLAGTDGAAATFACLLVIMYGASVVLALRSYREQKRYKGSREQPGSYSDAPEYLWSGTL

SEQ ID NO: 379 - protein, 118 aa, Homo sapiens
  SITE (51): Xaa equals any of the naturally occurring L-amino acids
ARPAAQQLPHEDAAAVRVRETPTRNGLGRVVPGRPAQRHPAAAHLLPAVPXLPSLLSAQPRPLSGQAPFGPGERCQADLEVGQGNSHQSQKPGQTIGCWGLLEKRHKRACSLRHTTQL

SEQ ID NO: 380 - protein, 82 aa, Homo sapiens
  SITE (81): Xaa equals any of the naturally occurring L-amino acids
VRPSLRGRPSGRARGESVQPAAPQAGWTLVPGSVPRERSTPCLILPEDGATGGCGIRAPCPALCLPAQAGHSAGRPPSAAXR

SEQ ID NO: 381 - protein, 34 aa, Homo sapiens
  SITE (31): Xaa equals any of the naturally occurring L-amino acids
  SITE (34): Xaa equals any of the naturally occurring L-amino acids
QTSPHPSRANLNGTPIKPFQNSRKKKKKKKXKKX

SEQ ID NO: 382 - protein, 90 aa, Homo sapiens
  SITE (18): Xaa equals any of the naturally occurring L-amino acids
  SITE (39): Xaa equals any of the naturally occurring L-amino acids
  SITE (51): Xaa equals any of the naturally occurring L-amino acids
  SITE (71): Xaa equals any of the naturally occurring L-amino acids
  SITE (78): Xaa equals any of the naturally occurring L-amino acids
  SITE (82): Xaa equals any of the naturally occurring L-amino acids
IKVGIKLGIPNMGWEHLXDLPNHLPPRKLPEYSHPSEEXHPSHEELELPSXLPFLTQGKQCQVFPMNKGAXRWPSFLXQAYXLATTVGWG

SEQ ID NO: 383 - protein, 68 aa, Homo sapiens
  SITE (17): Xaa equals any of the naturally occurring L-amino acids
  SITE (33): Xaa equals any of the naturally occurring L-amino acids
FSTVSIAVVFLCHRTLXVAPNAFPAHYEPRLYXLCSPYVMGGRSAGVLYSLTGFVYLLPSQFALVPSV

SEQ ID NO: 384 - protein, 45 aa, Homo sapiens
GRLNSDDPSQNGGSKQQVNLPCMQLMRISRREWVQISGGFCPADV

SEQ ID NO: 385 - protein, 16 aa, Homo sapiens
MFYLFSDEKTKAKKKK

SEQ ID NO: 386 - protein, 49 aa, Homo sapiens
  SITE (5): Xaa equals any of the naturally occurring L-amino acids
ISDNXLFSNRTHLPKCLVIYLNLILHFFLNLCNENKINISSNSSTKFVI

SEQ ID NO: 387 - protein, 171 aa, Homo sapiens
  SITE (152): Xaa equals any of the naturally occurring L-amino acids
STLHRQMEQYRDQPQHLEKIAYQQKLLQEDLVHIRAELSRESTEMENAWNEYLKLENDVEQLKQTLQEQHRRAFFFQEKSQIQKDLWRIEDVTAGLSANKENFRILVESVKNPERKTVPLFPHPPVPSLSTSESKPPPQPSPPTSPVRTPLXVRLFPSCKPTCRTDLTHPS

SEQ ID NO: 388 - protein, 56 aa, Homo sapiens
TTLEAGVVAHGCNPGTLGGRGGRITGSRDRDHPGPHGETPTLLKIQKLAGCGGMCL

SEQ ID NO: 389 - protein, 154 aa, Homo sapiens
  SITE (95): Xaa equals any of the naturally occurring L-amino acids
  SITE (96): Xaa equals any of the naturally occurring L-amino acids
ASISRSLSEASSLPAESWAPEGLPTTAPGCAIATSSQPPAQTRDSPSMAPEMDQFYRSTMAIYKSIMEQFNPALENLVYLGNNYLRAFHALSEAXXVYFSAIQKIGERALQSPTSQILGEILVQMSDTQRHLNSDLEVVVQTFHGGLLQHMEKN

SEQ ID NO: 390 - protein, 56 aa, Homo sapiens
  SITE (20): Xaa equals any of the naturally occurring L-amino acids
  SITE (31): Xaa equals any of the naturally occurring L-amino acids
  SITE (39): Xaa equals any of the naturally occurring L-amino acids
  SITE (53): Xaa equals any of the naturally occurring L-amino acids
GFPPFWFQEDMNSVFIVTPXTLLKPTSFFIXVGSVCPGXLTVACVMLMNICIXRLP

SEQ ID NO: 391 - protein, 87 aa, Homo sapiens
  SITE (1): Xaa equals any of the naturally occurring L-amino acids
XPAGTGPEFPGRPTRPIFLMCRHSSHIAVLPALALLLLPFMLGVKPEALWAEAAHAGTRVLYSITWSARGPWPTLLLTLENTNFHKG

SEQ ID NO: 392 - protein, 40 aa, Homo sapiens
FHHVGQAGLNLLTSSDLPASASQSAGMIGVSHHTRPSTGF

SEQ ID NO: 393 - protein, 89 aa, Homo sapiens
LRDLPTSASQSAGITGMSHRAQPKVISFLFHLVQIFIRIFCARNSTMFCYWMLLLSPLGVNTIVYSFHYLPKIGKILKYILHQAFWIKD

SEQ ID NO: 394 - protein, 72 aa, Homo sapiens
  SITE (30): Xaa equals any of the naturally occurring L-amino acids
  SITE (31): Xaa equals any of the naturally occurring L-amino acids
YTNFEANISVHEKELFISVCWKILMGIPLXXHCQNCGIFITGEFTMLKAKNKKKKKGKKEKSTKQFEDILSQ

SEQ ID NO: 395 - protein, 64 aa, Homo sapiens
QLTVCNTEVLLRKTNGHADFDVIATVCVCCESHQQNWMVDCSIGVSSHPSQNPEYYMSSLIVRF

SEQ ID NO: 396 - protein, 64 aa, Homo sapiens
PHQDLDLLQKLQVSSALKLSIEPSHKSTSLKGLKSINTFHFISLPLTSLQFPWPLGSFILLTFL

SEQ ID NO: 397 - protein, 70 aa, Homo sapiens
  SITE (61): Xaa equals any of the naturally occurring L-amino acids
GGVWPAAHSQPGQLPDVARFQLHSSDRTKRNAGPPGRETHKPFLQAGVSDPILRMGFERKXRAVAPGRVQ

SEQ ID NO: 398 - protein, 61 aa, Homo sapiens
  SITE (6): Xaa equals any of the naturally occurring L-amino acids
  SITE (25): Xaa equals any of the naturally occurring L-amino acids
SKSPGXSRMGRVAGRTPCCQSPRPXSRLAPLPVPFTPKFCSLRADWLMPLQPQPKSASKTE

SEQ ID NO: 399 - protein, 71 aa, Homo sapiens
LPKEALDSLTEPVINVTCEKTWLEVVKYLSSIPPKDKKNLWMRMKIWHKSNHWRKLNLKLLTPIQVNAARG

SEQ ID NO: 400 - protein, 57 aa, Homo sapiens
  SITE (28): Xaa equals any of the naturally occurring L-amino acids
NPVQGYHPDRALGTSVPHPNVGIAHGDXRGHRHSLGAFCVGTVTTSPVSQSVVSPLK

SEQ ID NO: 401 - protein, 41 aa, Homo sapiens
  SITE (12): Xaa equals any of the naturally occurring L-amino acids
ASWAANALPLNXTATDKPECTSQGKRTNIDEVNPNMLIPFP

SEQ ID NO: 402 - protein, 39 aa, Homo sapiens
  SITE (29): Xaa equals any of the naturally occurring L-amino acids
THKHVDRFIGFKMYFYILPYLIFTTVVKXVKSYKKTDSQ

SEQ ID NO: 403 - protein, 51 aa, Homo sapiens
LSLRVCVCVCVYVPLSIENWKRLLLALFTVQVTKVLSSSFHWKPSYLINYM

SEQ ID NO: 404 - protein, 53 aa, Homo sapiens
  SITE (11): Xaa equals any of the naturally occurring L-amino acids
CRFLRMPKIRXQKSYSMKSEKQQKLKVTLKNKFPNFSQFPMFITIIKSLTFWN

SEQ ID NO: 405 - protein, 63 aa, Homo sapiens
  SITE (13): Xaa equals any of the naturally occurring L-amino acids
RGDIDIQLICLGXCNRDELVSSHLSHKPQRKLILIPGEKKPNSRNVLYHRTVTACTGARARAE

SEQ ID NO: 406 - protein, 144 aa, Homo sapiens
  SITE (111): Xaa equals any of the naturally occurring L-amino acids
  SITE (142): Xaa equals any of the naturally occurring L-amino acids
SWEPGSWTEPWRWPFPAAESPPHRCIYCTNHVSPAGPARPSHVYIIRATINSISHPLCRAQSSPWEAAGVWRRPAQPAPTSDVNINLLRKPRVKRHDLIYQFLGNTLWEEXRQRPPETLQPPANRGGGPVGRLGSQGAGRVXRP

SEQ ID NO: 407 - protein, 86 aa, Homo sapiens
  SITE (12): Xaa equals any of the naturally occurring L-amino acids
MRKDQRRGYWGXIQCPLRPLGSRPPLPLSCELPKTPRVPACPCLGQPRAPTPGSSHLPPLWPLSRPSSFLLPTSAPAVPTLGFSSP

SEQ ID NO: 408 - protein, 210 aa, Homo sapiens
  SITE (2): Xaa equals any of the naturally occurring L-amino acids
  SITE (6): Xaa equals any of the naturally occurring L-amino acids
  SITE (9): Xaa equals any of the naturally occurring L-amino acids
  SITE (129): Xaa equals any of the naturally occurring L-amino acids
  SITE (133): Xaa equals any of the naturally occurring L-amino acids
  SITE (148): Xaa equals any of the naturally occurring L-amino acids
IXFYCXSRXAVTPAGPGPEFPGRPTRPIAFFNNVYLDMESISNNLWKYNRYRYIMTYHEKPWLPPPLILLSHVGLLLRRLCCHRAPHDQEEGDVGLKLYLSKEDLKKLHDFEEQCVEKYFHEKMEDVNXSCEXRIRVTSERVTEMYFXLKEMNEKVSFIKDSLLSLDSQVGHLQDLSALTVDTLKVLSAVDTLQEDEALLAKRKHSTCKK

SEQ ID NO: 409 - protein, 133 aa, Homo sapiens
  SITE (58): Xaa equals any of the naturally occurring L-amino acids
  SITE (133): Xaa equals any of the naturally occurring L-amino acids
AIVPSWDLDKDTISLLSPVLCIFPSPSSQTSLLYVFSLAGRMTQNTVIVNGVAMASRXSQPTHVNVHIHQESALTQLLKAGGSLKKFLFHPGDTVPSTARIGYEQLALGVTQILLGVVSCVLGVCLSLGPGMX

SEQ ID NO: 410 - protein, 57 aa, Homo sapiens
ASYSFRYIVILPWKIFQQADLDLIYFSKTSSTLWLVSFLFHYNDISLNNIASDLVVL

SEQ ID NO: 411 - protein, 56 aa, Homo sapiens
  SITE (34): Xaa equals any of the naturally occurring L-amino acids
EVDKGHQHQCRSQMGGKVKKGHPRQEHKECKSVXEKMVVMGHFEDIKTVPQTKPLI

SEQ ID NO: 412 - protein, 94 aa, Homo sapiens
RWPLQKHVAKSPPGGDRAPPNQAAAPGEKLAEVTEQSPPKVFTKWSLSCWRFLRVRKQLSQDRGTLRSGSTELWGRRGPGLGSCHPGQLPGVGD

SEQ ID NO: 413 - protein, 96 aa, Homo sapiens
  SITE (57): Xaa equals any of the naturally occurring L-amino acids
  SITE (59): Xaa equals any of the naturally occurring L-amino acids
AGEPGATYTLESPRLGPGPAAYTLESPTLRPGPGCLRRLPCWLWVQPGRRVQGRVGXAXLGATHLFAFSPSPPHAEVPAVRLSAAVGSQCLQGCHG

SEQ ID NO: 414 - protein, 78 aa, Homo sapiens
  SITE (37): Xaa equals any of the naturally occurring L-amino acids
  SITE (38): Xaa equals any of the naturally occurring L-amino acids
  SITE (39): Xaa equals any of the naturally occurring L-amino acids
  SITE (40): Xaa equals any of the naturally occurring L-amino acids
NSRVPGSGNSSTIVPLGNADGTVTLGLCMLRGSIPHXXXXAVLGLTTVTDDATLGLASASKTLGLHYTTEELGNQRPR

SEQ ID NO: 415 - protein, 186 aa, Homo sapiens
  SITE (8): Xaa equals any of the naturally occurring L-amino acids
  SITE (11): Xaa equals any of the naturally occurring L-amino acids
QSQQRMRXSQXPFCDNQQSSPDPWTFSPLTETEMQITAVEKEKRSSPETGTTGDVAWQISPKASFPKNEDNSQLEMLGFSADSTEWWKASPQEGRLIESPFERELSDSSGVLEINSSVHQNASPWGVPVQGDIEPVETHYTNPFSDNHQSPFLEGNGKNSHEQLWNIQPRQPDPDADKFSQLVKLD

SEQ ID NO: 416 - protein, 47 aa, Homo sapiens
  SITE (17): Xaa equals any of the naturally occurring L-amino acids
  SITE (20): Xaa equals any of the naturally occurring L-amino acids
KLVRLQVPVRNSRVDPXVRXRVRHVFGYYSGGMFLLYKISSLNIYNK

SEQ ID NO: 417 - protein, 106 aa, Homo sapiens
LKSLETLSFNQYETHEEENECLLLGRTARKVSIFAVLTNLDVRPSKNAIFLAIEFENQIDYPPEFLQTLKYSLRIKEVKDLCVSQNNLLLLVTVSLSLPGGSSFLW

SEQ ID NO: 418 - protein, 56 aa, Homo sapiens
LFLKSVSPSFSLAIFSFTTLYLAKGGHEKPGQWKRKPFCNSGYRGGRVKFPGSWGS

SEQ ID NO: 419 - protein, 49 aa, Homo sapiens
KIFFKTPSKIFPLKWVSSYFNQKKIRGPKPGWSIWLKLIQLGMWVEPIV

SEQ ID NO: 420 - protein, 215 aa, Homo sapiens
  SITE (138): Xaa equals any of the naturally occurring L-amino acids
  SITE (214): Xaa equals any of the naturally occurring L-amino acids
GKLVRLQVPVRNSRVDPRVRGYYADNSTGRCERCNRSCKGCQGPRPTDCLSCDRFFFLLRSKGECHRSCPDHYYVEQSTQTCERCHPTCDQCKGKGALNCLSCVWSYHLMGGICTSDCLVGEYRVGEGEKFNCEKCHXSCMECKGPGAKNCTLCPANLVLHMDDSHCLHCCNTSDPPSAQECCDCQDTTDECILRTSKVRPATEHFKTALSSPXP

SEQ ID NO: 421 - protein, 57 aa, Homo sapiens
  SITE (8): Xaa equals any of the naturally occurring L-amino acids
NKLKHISXTESVSLKRKCYKKKSRACARKMKRYQQTILTVNISMSIFTGNIDIEIFK

SEQ ID NO: 422 - protein, 83 aa, Homo sapiens
PLEGLHVVWGMCLPVSGKAHRRRAWILILDPLASGSRHTSLLGPSETPHLPLFLRESQNHLPGLFLPTSLIVLLPSPKSILYA

SEQ ID NO: 423 - protein, 35 aa, Homo sapiens
HLIIYVIMGSISLFFKHHICVCFKINIRHHIFKHI

SEQ ID NO: 424 - protein, 65 aa, Homo sapiens
VAGTTGVCHHAQLIFVFLAQTAFCHVGQDGLELPTSGDPPTSASQSAGITSVSQRWPLPSFIHKK

SEQ ID NO: 425 - protein, 151 aa, Homo sapiens
TPPSPLAPSVGGRTRRGPRRDGSERFLCESVFSYQVASTLKQVKHDQQVARMEKLAGLVEELEADEWRFKPSSSCWDSPPLQVDTAWMVTSGAHKCKASGGLSHSLHSHPEIHSYVTELLMHICTWFLCIYSQATNTYMCDLSGNVLFICF

SEQ ID NO: 426 - protein, 89 aa, Homo sapiens
SFFSKQPVRNKHPTGWKRTEEPPPRPLPFSDPKKQVDTNTKNVFGQPRLRASLRDLRSPRKNYKSTIEDDLKKLIIMDNLGPEQERDTG

SEQ ID NO: 427 - protein, 103 aa, Homo sapiens
  SITE (13): Xaa equals any of the naturally occurring L-amino acids
  SITE (88): Xaa equals any of the naturally occurring L-amino acids
  SITE (95): Xaa equals any of the naturally occurring L-amino acids
PSWDPKSTALQGXWEHQPGAFSNPNAQPTDFDFLKVIGKGNYGKVLLAKRKSDGAFYAVKVLQKKVHLKEERSRTPSWQNAMLLLKKXRDPFLLXAALLLPKT

SEQ ID NO: 428 - protein, 62 aa, Homo sapiens
PSLKCERRTLLRGHEQPLEGWSHSLTVTALPETPPECHTIISLWVRPAGPHDHFLNLNFQCY

SEQ ID NO: 429 - protein, 99 aa, Homo sapiens
SAGCCPEQAPSTMTVSYTLKVAEARFGGFSGLLLRWRGSIYKLLYKEFLLFGALYAVLSITYRLLLTQEQRYVYAQVARYCNRSADLIPLSFVLGKAPF

SEQ ID NO: 430 - protein, 79 aa, Homo sapiens
  SITE (2): Xaa equals any of the naturally occurring L-amino acids
YXAKSTMTEECSHHLQGSDWFPAWLPHRTGRESIPELSSVFPDVMKEDIFLHKVSPNFWLGHRSSDSTVWCTHGKLNQS

SEQ ID NO: 431 - protein, 61 aa, Homo sapiens
SNTPPAIVLPKQSKQHLTTLWVQLLTHSAYKGQRNTLNCILTMQAAKSKLRETLQPRFFNR

SEQ ID NO: 432 - protein, 128 aa, Homo sapiens
  SITE (2): Xaa equals any of the naturally occurring L-amino acids
  SITE (6): Xaa equals any of the naturally occurring L-amino acids
  SITE (7): Xaa equals any of the naturally occurring L-amino acids
NXLDIXXKVKGMFPIYIPPPPSQMPSAQLGTAGTLKEDEGTSFHLEALFMPSFLPSFPCLFGPGWVRWPAMSRKSRDREGYRRATPDVAGILKWKTKPKKKKHYKKRNSLPSFPPHSSVKMSYKEGRR

SEQ ID NO: 433 - protein, 74 aa, Homo sapiens
TLWVHLHAVFFFCKSYTRCVSPFFYLFHLWHPWHSKTNPPLPPPPPQPTQGKDKDEDLYDDPLHLIYNKYIFSS

SEQ ID NO: 434 - protein, 73 aa, Homo sapiens
KSIELYIISRYEHTFLKSEFEHQKEEYARILDEGKIKYESEIARLEEDKEELRNQLLNVDLTKDSKRVEQLAR

SEQ ID NO: 435 - protein, 99 aa, Homo sapiens
  SITE (35): Xaa equals any of the naturally occurring L-amino acids
  SITE (42): Xaa equals any of the naturally occurring L-amino acids
  SITE (46): Xaa equals any of the naturally occurring L-amino acids
  SITE (47): Xaa equals any of the naturally occurring L-amino acids
  SITE (69): Xaa equals any of the naturally occurring L-amino acids
IAVSLSLCFVSVCELILASLSVLVLAENKTTKGTXPWTHGGXPPWXXPRAHARAPDGLLSGEQWHGGVXKRERGNSKGPGAGKGWKGGGRNKIAPLLET

SEQ ID NO: 436 - protein, 73 aa, Homo sapiens
  SITE (14): Xaa equals any of the naturally occurring L-amino acids
  SITE (20): Xaa equals any of the naturally occurring L-amino acids
PTWQGLVCVCLYPXVLCTAXAKYTVFDAEGYVKPQSCIDIVIRHVAPIPSHCDAHTLPCLLPSSLSCLLPTPP

SEQ ID NO: 437 - protein, 96 aa, Homo sapiens
FFSDFIGFYFSTNTDRQGNLQKETESIVNGCSYWLHGVDNTKDAWCLRAEAAAMPALVWLLRNIWGHKCSLCPDLNFVDGADSLGRPCKPDVAQGL

SEQ ID NO: 438 - protein, 46 aa, Homo sapiens
PTESSLLQNLRPCGYFYSLAKVRKDVIGLFEPLCFYPLFLYDLHLY

SEQ ID NO: 439 - protein, 61 aa, Homo sapiens
  SITE (13): Xaa equals any of the naturally occurring L-amino acids
LVLDRERSPFFFXFVFRNLLQAYNQMYRRINAQSNLHYSIIKNSIKIIKNKGNNQNILNWK

SEQ ID NO: 440 - protein, 54 aa, Homo sapiens
  SITE (46): Xaa equals any of the naturally occurring L-amino acids
KPSLAHRINPWPFLHMIKVKSTVFKPDIIRVQYFDSILPSSFFRKXNVVILKLL

SEQ ID NO: 441 - protein, 51 aa, Homo sapiens
  SITE (6): Xaa equals any of the naturally occurring L-amino acids
FICTNXSAHYDGLWTKSGPLTVFVNKVLLEHSPHIFVDLLFLAVFVLHWQS

SEQ ID NO: 442 - protein, 49 aa, Homo sapiens
IYIVLIPRVCHLLYTLYSRNPCCTTIILKKTLSYPLWSCQSNVLVNAYY

SEQ ID NO: 443 - protein, 57 aa, Homo sapiens
TLSPPFAGSSLALIKGWFLEDICKQTYLDKFLYTTLLPTLRPQPRGKRISCLQLYSL

SEQ ID NO: 444 - protein, 49 aa, Homo sapiens
  SITE (39): Xaa equals any of the naturally occurring L-amino acids
RVLKGPDDEIGCPSSQMSCTVHLERALTLLYEAVGHKMXSKELKTAAIW

SEQ ID NO: 445 - protein, 47 aa, Homo sapiens
  SITE (43): Xaa equals any of the naturally occurring L-amino acids
TCHNYILIADAFFNKMYIVNNILRRSFSLTFKKYSSPGKCYTXGKFC

SEQ ID NO: 446 - protein, 86 aa, Homo sapiens
  SITE (34): Xaa equals any of the naturally occurring L-amino acids
QVGKPVGQVGTCREACSEGGVCTEPSQRDVFYRXLSYTQSGNTFWILGCFVVVETESHSTPRLDCSGMILANCNLCLPGSSNSHSS

SEQ ID NO: 447 - protein, 69 aa, Homo sapiens
  SITE (7): Xaa equals any of the naturally occurring L-amino acids
  SITE (33): Xaa equals any of the naturally occurring L-amino acids
GDLEGSXILPPPHRVSAYPLYRLECLAWVPGPXRASVSPPVILVRTQPLPAHLHGAGATKQTGSAGSPR

SEQ ID NO: 448 - protein, 109 aa, Homo sapiens
GNLDLWHYFYFSPCFNCSLHFKSFPIIFNSASQMQRHVKELITSQRILSPLHSFIRKPIISKQNQTKPKRLLVEMKQNFKASFKTNIFLCSKLLWRFLPLYHFGNISLQ

SEQ ID NO: 449 - protein, 36 aa, Homo sapiens
EFRLPNFETFLRSWDETLVDHDMSFFIPLLNLLADI

SEQ ID NO: 450 - protein, 79 aa, Homo sapiens
  SITE (43): Xaa equals any of the naturally occurring L-amino acids
  SITE (78): Xaa equals any of the naturally occurring L-amino acids
SDSCIKSYQVLKGSMPLLCQIEMEYLLLKWQMTMLQSMLCDLXSYPLLPLQQTKEANLGLSKNKSIICLLLTPTRGVXF

SEQ ID NO: 451 - protein, 68 aa, Homo sapiens
FCLDYCTTSLSLHQAHISTVETFFKKIIIEDYILQRFCFSREKSNTNLIIYLRKTSDNCKCPSIYVIP

SEQ ID NO: 452 - protein, 63 aa, Homo sapiens
AWLSPGKTFFRGMDKPQRTCRTLTFPLTVFQAASEITKWGSSMTYFVNMGFTFSKNSPLLPQC

SEQ ID NO: 453 - protein, 116 aa, Homo sapiens
ATVTSILYPAITKYEKRLQNNTYPVSDDSILSSDSSSFCSTCSEDFTYRSYTSATTKTFQAEPCAFVVDTSVRRPTTPIKPPPAHVEKTVVGKTCHIKGQSIISKHKYNKTNLLYS

SEQ ID NO: 454 - protein, 32 aa, Homo sapiens
  SITE (14): Xaa equals any of the naturally occurring L-amino acids
LIKLSALLFNNVWXNQRKYYEDKIFYIQGVIQ

SEQ ID NO: 455 - protein, 78 aa, Homo sapiens
IVNIIASWEGKYSEDEIFPNEARGKTLLKQTIRKKKKLKIQKFPNLEVGISVASECVLKKASLSHGKKSLTVGVFKFF

SEQ ID NO: 456 - protein, 62 aa, Homo sapiens
TAIVGVASVALYLTRTQRKKSLLFKEKGKIASGLHFPLFVSHGKKQEFQNRVKFSWFYEIIL

SEQ ID NO: 457 - protein, 35 aa, Homo sapiens
VSFIKLISRILKIQIIEIIAFVKFSFNSFILKCNS

SEQ ID NO: 458 - protein, 98 aa, Homo sapiens
  SITE (68): Xaa equals any of the naturally occurring L-amino acids
  SITE (86): Xaa equals any of the naturally occurring L-amino acids
  SITE (98): Xaa equals any of the naturally occurring L-amino acids
HMYSVACCLRCYCRVTYGTDSIRMKLALDNPSDYMHPDRLLLGLPSVLSLSSVWRPQIFIISATSDAXWGWEREGPVDLWERKRIXQTDCCERVGGEX

SEQ ID NO: 459 - protein, 89 aa, Homo sapiens
LSQDEGRGTLYKYRPEEVDIDVSISMIYVVSTLSYSPPKTLEISMTKKLLSPKSSKVTSGKFIFYVCALNYYSLPSTSHCSLLLAVQRY

SEQ ID NO: 460 - protein, 67 aa, Homo sapiens
  SITE (52): Xaa equals any of the naturally occurring L-amino acids
LESTRDKTQLASLKGGPLQPAAPHLSSHGLSLPSLCFPSVNKWPVRPDSFRXSQTWVQILTLPLLAV

SEQ ID NO: 461 - protein, 111 aa, Homo sapiens
  SITE (12): Xaa equals any of the naturally occurring L-amino acids
FPDIQSRNIPPXSQDCCTNWLTQFLSHGTCSTVRALWKEQLTLSSRIGGGKEVSNRELIVESKTCKGRVRMWEDIPGRRNWIVESPELRHTGKVGNYRFLSRPPELEIKSM

SEQ ID NO: 462 - protein, 48 aa, Homo sapiens
LGISSRPAGLSPLFQSLPCPRLRECLAHSRCSVSYSLIKKPGKPGCVV

SEQ ID NO: 463 - protein, 54 aa, Homo sapiens
  SITE (52): Xaa equals any of the naturally occurring L-amino acids
VLFDQGTMLSDLVLLMCWLYLQLVSSLTIADNHSSFRPYIHTSRKKEFLISXNY

SEQ ID NO: 464 - protein, 32 aa, Homo sapiens
  SITE (6): Xaa equals any of the naturally occurring L-amino acids
  SITE (7): Xaa equals any of the naturally occurring L-amino acids
  SITE (27): Xaa equals any of the naturally occurring L-amino acids
LTIYCXXGCGGVNQTGSLGFICWGSAXDIVRK

SEQ ID NO: 465 - protein, 76 aa, Homo sapiens
ISVLLFCFPPCPAPELLAAQSFCLLVCRGCRTCAPAASAPPTATPAPTPLSDTTSFPISKVRRQVSPGSTLHMEIY

SEQ ID NO: 466 - protein, 85 aa, Homo sapiens
ANLTPQGLSRHHVGLSSANHRAFHHDRSQLQIQRPSILLECMVASTQGWLTKTAESPPSAGPFSLLAFNYQHPVGPKESLPSLLT

SEQ ID NO: 467 - protein, 74 aa, Homo sapiens
ENIIDSSKKAGSMFHSVLYPFERKIVTYSCGNQCFPFTPLLLSLHPSFVNHCVPTDYSLCLLVTVMGFFWPFFF

SEQ ID NO: 468 - protein, 48 aa, Homo sapiens
ESLLSPKGNTQFPPSVRSLPHLPTCAMGLILKKFIYSLDCCSETPATL

SEQ ID NO: 469 - protein, 109 aa, Homo sapiens
LETFCQRVFLALLLCRLPYRLVLVQKHLSPSRHLLLIPLVCYLLALNFSKVYILKAFTHHPFFRVHDLFRDFLGWLYCKSCQVMHNIWTQFPPAGECVVLGLMLSQLFV

SEQ ID NO: 470 - protein, 81 aa, Homo sapiens
  SITE (72): Xaa equals any of the naturally occurring L-amino acids
  SITE (77): Xaa equals any of the naturally occurring L-amino acids
NSARAKSEVTSLGTESPQGSSYCFFYPCISLSSLNLSQLQEGRDFNLGNKSTEHEISEGVWDTSWLHKNPFXIVPAXLSSK

SEQ ID NO: 471 - protein, 40 aa, Homo sapiens
  SITE (16): Xaa equals any of the naturally occurring L-amino acids
AHEFQTGLGNMVKPIXTKKTKISRVWWHVPVVPATWEAAV

SEQ ID NO: 472 - protein, 47 aa, Homo sapiens
  SITE (26): Xaa equals any of the naturally occurring L-amino acids
RFLATDTPGQHSETSLATDSPGALKXRRAHCSASSMYSLFFQLCKML

SEQ ID NO: 473 - protein, 85 aa, Homo sapiens
  SITE (45): Xaa equals any of the naturally occurring L-amino acids
QVFISRQQPITTLHSCRAQSADGLLQVILLHPQPLACPAWLCYHXASLRPCPTPHHSHEHPVEDCRKKLRVQVTLVSGAPSKLPL

SEQ ID NO: 474 - protein, 27 aa, Homo sapiens
ACLTCIFSVRTSKPSRNSRQYNVLGPF

SEQ ID NO: 475 - protein, 48 aa, Homo sapiens
GYHICPLIPLVLLPSPGEECVSGSQLIQKGSDIFRCGTKASQAQPSPA

SEQ ID NO: 476 - protein, 130 aa, Homo sapiens
  SITE (120): Xaa equals any of the naturally occurring L-amino acids
CRPAPPNPCVMLERVQPLVSFTKPPHLFLLRPSLKSSLLYLVKWDALFPIQLKQKLLTMRRMRMHLCICSAWLIPSKISHYSCLAVSFSSFASKSTVVALITDLFTLLIPAISPISVLRXFCSQNYLLNP

SEQ ID NO: 477 - protein, 83 aa, Homo sapiens; identical to SEQ ID NO: 422

SEQ ID NO: 478 - protein, 78 aa, Homo sapiens
  SITE (62): Xaa equals any of the naturally occurring L-amino acids
KYFKSFILLFKRGSGVVVKYADLLGAGWESDSQHTSIQCEDILDCHSPLEFSHANIPSVFIXWPLFLPFFNVVCPDFL

SEQ ID NO: 479 - DNA, 9557 bp, Homo sapiens
ggagcccggccgggacaggaagaggctggggaccgcggcgaaggtggtgagtgctcttgggcgccttctcccaacgtccctgccagactcgcctccgggctgattctccagttggtttcctggactccagagtagctgtccggcctggccccggaggtacgttggttccatcccccgccggcctcctcgcaccagtttgggtgaccgaggaacccccaggccggcagaggctgagccctcgggttcgagtccgtgttttcactttttgtcagactgcgggcgcagaagacgggatttgggtcaagacattcggctctggccccctggccggccgggggaaccctggaaccccatggagacagcaggtcacttcctgcttcctggtccccacggtggcttcttggccaggagtgcagggacgcctcctctttctccacgtcgggctcaaaagggtggaaactaaggcagatcggtggtggagcggtcagatggggattgaagaggagtgtcattcctcagggaattgctgttcctgacaaaaccaaacttgtttggggttggagaacggggattgaggaggttagatggagttgtcccttgatcggaaacccagcctctttaattacagctgcaccttggtcggaagcccagcccctccgtaacctaagcgctcaaagccggtctgtccagaataggggtggtgaagggacggaaaattggagttgagaaatgtagtactcctttcacgtaaagtttcggtgtataacacttacaagtaattgccaacttaaaaaacaaaagactgtttcggtagtttagtaataatattggcttgggatgaggttttctttgaagagaaacgccttgttacagagggaaaagccgaccatacttgatatgagtaatattctactatgctacagttctggaacctatagagcttctcttattcacacatttaatcttcatgctaaatagtaagtattaattttcatgaagaatattagaggaccaagcctcccaacctctagggtaaagcactgattattaagaatgtgatagaatttttattttaaaaaaatagggagtttctttcttacaggctttggggcatctgtacgataaattgttattttgtatacttgtatgatatcttgttatatagtttgatatttccccaaaataccttctttcaggtgcaaagtaagaaaattgaagtcaaagaccatgggagatacagcaaaaccttatttcgtgaagcgcactaaagaccgggggactatggatgatgatgacttcagaaggggtcacccccaacaagattatttaataatagatgaccatgctaaaggccatggcagtaaaatggaaaagggccttcaaaaaaagaagataacaccagggaactatgggaatacccccagaaaaggaccatgtgctgtttccagcaatccatatgcatttaaaaacccaatctacagtcaacccgcttggatgaatgacagccacaaagatcagagtaagagatggctgtctgatgaacatactggtaattcagacaactggagagaattcaaacctggacctagaattcctgttataaaccgacaaagaaaagactcctttcaagaaaatgaagatggttataggtggcaagacacaagaggctgcagaactgtaagacgactgtttcataaagacctaacaagcctagaaaccacgtcagaaatggaagcaggaagtcctggtaatgttttccaacttgtcagatcacaaccccagagtcagcaatgttttattctttttcatccaaatgagttttgttattttcagcaatttagtttcagtttttcacagtttctgttttaagaaatggtcacttagtgtgattattttaaggatagtaatcatgatatttgagcagctaaaacacatttcatatgttgatccctttaaaagtttactttgccccagggctcactttacgtcagtaaacatgttttctgtaacgtgttttttacagaagagggtagctatatgctccaggggaccatatcgtaattgctcagtggtttgtgtgttttcaaaattgtgattataattttgtatttgaataattaatgtgttcataatataaatgacagaatataaagctttttttaaaaaaaaaacttatttgttgatgtaaaaacacagtatacactgcgtatatctcctgccacaagagatatatcttttggatgtagtgtcagtgtcccgagatggataatctgagatctttgtttttcaaaagggatcgtgacaaacaggttgagaaacaagtttagaaagtcagaaatagattcaagctttgctgtttggtttcagtaagaccaaaactaatttctcggtgccctcacatgcttggttaattgccccaaagggataataaggagataatatgtttttctaaaagtaaaaagtagattttatccatgtggcaacgatttctgcaaacaggaaggttatttttatctaatgggagatatataccgaaatgaaataaagtcacaaattggatggaaaaaatgaaacaatatcacagttggaaacatggacttgtaagtttagtggctgaaagcgttttttagtggttgtatagaatgtgtttcaaactggccagcacttttaaataaatttttttagtttaaatgcattcagggaatatggacactttctagatcacccgatgccttttctcttcatgttatctcacagtggccagttcatacactggttacctataaggtgtttgaatttgtgtcccatgcgtatagaatacttaaaagccaaaaggtcgtcttttatctttacaaggtcttaggataaaaatgaaagtctcaagcacttattaatattaaatggggggaaatgtgctacttgattttttttcttttttcacagatacttctagttgtcagatctgtttatttatattttattttattttttgagacggagtctcgctctgtcacccaggctggagtacagtggcgcgatcttggctcactgcaacctctgcctcctgggttcaagcgattctcctgtctcatcccccaaagtagctgggactacaggcacatgccaccacatcaggctaatttttgtatttttaatagagacagggtttcaccatgttggcctgactggtctcaaactcctaacctccagtgatccacccaccttggcctcccaaagtgctgggattacaggcgtgagccaccacattcagcctgattttttttttttttttttgagacagtctcactgtgtcacccaggctggaggtgcagtgatgtgacctcctctcactgtggcctctgcctcccaggatcaagcggttctcatgtctcagcctcccaagtagctgggactacaggtgcacaccaccatgcccagctaatttttctgttttttaatagagatagggtttctccctgttggccaggctggtcttgaactcctgacctcaagtgatcgacctgcctctgcttcccaaagtgctgggattacaggcgtgaactaccgcgcctggccctcagatatttttaaatttgaaaattaagagtatatattaatatcaagtagcagaaacagaatgaagtgttataaaggcgttaagtagtagggagacataaaacttaaatctttaagctagaaatagcttgaggaattatctgatgcagtactctgttgtaatatatcaaaaatggaatcacagttttacaaatcaggcagctgcagctcagagaggttaaatttccacagacctgtttatgcagcgcggtaaatgaggaagtagaactaaaattggggactctgctactctggccattaactcagcctcgctggacctgaaatcctgacggcggagccgaatatttcttgataatttctgggcttttgatttgtgtttttctttattaaaaattgtgtatatttaagtgtttctgtattactgtccaggtgggatgtgggtatttaattttgttacctatagtcttgtagaagttgatcttgaaaaccatttcattttattattattattctcttttttgagatggagtctcgctctgtagcccaggctggagtgcagtggtgcgatcttggttcactgcaacctccatctcccaggttcaagcaattctcttgcctcagcctcctgagtggctgggactacaggcacgtgccaccacacctagctaatttttgtatttttagtagagttggggttttagcatgttggccaggggtagtctcgataccctgacctcatgatctgcctgccttgacgtcccaaagtgttgggattacaggtgtgagccactgcacccggctgaaaagcattttaaaaagaaagtttatagatcaaaaatttgcaactagacattaaaaggaactgttggctgaccacaaaaacttttatatgttttcttattttatgtgtattcttataaaagcaactaaagaagttgcttttaagtgtatttgaataggaaatgcattttgctatttttttattggaggtaattcaaaagtttgcatgtttttgctgtatgacatacaggtatatgctttcacagttattaagtaaagaattattcagtttctatcccttgaaaatcttcatataggaagcattaagcttcggtataacattatttagtttagagagattcaactgaaagtataaactaaaaaggatctcattaaagagatcgaaatttctttatcaaaattgtgtcttaataaggaagggtattattcaacaatgtgagaagatataatggaaattatggtggagttgcttttttcccccccacatacggtactaccttctgtttttttcagctctacattactgcccctactttagccttcaaatgtcctagattgccagtttaatgtatttgggacattgccattaatgatcttagctggaaagcatccactcaaatacacatgtcctttgtgaaccatatgcaaataaaatatgggaaacttggaatgccgaatatagagaactcttattacaataaatctgaggtaagccaggtagtcttcctccaagtaattatgagaatttttcttttttcttttttttttttgagatggagtttcactcttgtcgcccaggctggagtgcaatggcatgatctcggttcactgcaacctctgcctcccgagttcaagcaattctcctgcctcagcctcccgagtagctgggattacaggtgcctgccaccacgcccagctaatttttgtatttttagtagagacagggtttcaccatgttggccaggatggtctcgaactcccgacctcaggtgatccacctgcctcggcctcccaaaatgctgggattacaggcatgagctgccacgcctggccaagaatttttcatcagtacctagctttaccctccaagagtccctccggtgagattttgacagtttttaccatgcatgcctgtgaaagtaggtttagaaggttatattgcctttcagtgctagtccactctagatgtgaatgggtatgttccaagaagggattttagtaatttctttccagtttttatgttgttagttagaaggctgaatttcaggatttcatcctttttttgtttgtttgttttttagacagagtctcactctgtcacccaggctggagtgcaatggcgcaatcatgactcaccacagcctcacctcctgggcttaagcagtccttccgtctcagcctcctgagtagctgggaccacaggagtgagtcatcttgctggctgatttttttcatttttgctagagatgacatctcactatgttgtccaggctggtcttgaacttctgagctcaagcagtcctcccaccttaccctcccaaagtgctgggaattacaggcatgacccactgcacctggccccatccatattttaatctatattttcaatccctttactttgatttagccatgtgttcttggagaagttattctcttggattcgcattgtccccatctgtacaatggggacagtattagcaggattgctgtagggattaaataaggcagtacatataaagtgctttacatctgttgcataataagatacaccatcatggtagctgccattatctgacagaatttctgcagccatccacttctgtataaaagcagtaggagttgattgaggtctttggaggaagagagaagttactctttctagaaaatgacagcaaatatggttatatggagaaacctttgtgaccagaagagaggaagagtttaaaaaaggaattcggttccctatcacttactggcttgtgaactaataggggcttttctaaagggtattgcagtattattttaaatttatagagtttttgcctaagaaacctgtaataaacactgaagttagatgcagtttttttgataatgtttataatgataagcaaactaaatgagaatggatacatctctaagtaaaagaagtgcttatctgaaaaaaaaaaattgttcagaccagaaatactggccttaaaagattatgataatttaattgggagtcgggggagtattaaaaaggaaatattaaggtagcgcaaggtagcctgattttctgttgaaatgacaacttaccttttagtattttatttgttcagtgtattttgattgattttttaaaactacttttccaacactttaattttttttaattttttaattttcttatattgtggaaggtgtttgcagaattttgagatagtcatctcaggtagttttagcacaatgcttgctgcttatcctttagcgctctcagcaagctttttataaaattggaggtcctatatttccttttcagcctgccagttcattgtaattgccatactagtagtaatgagttcctctgaaaacttgatggaggaattacttcatgtagggcttttcagtaggtttatgtttccaagcactaatgtgttactaatagtttcattttttaaaactcgatataagttatcaaagctatctaaaacaattttttatggtttaatcccacaatcactttaacaagttgaaaagttataagttttaaaaaggaacaggatgatttttattcattataaggattatagaactaatagcagagtttataaacaaatgtacttagagaaaacttttgtttcaatggccagttgtttttttcctttgaaatatgctcagtgtacaggccattcaaagaagctaaaatgaaggtaaaggtaaaatgagagatagttgtccttagtaaataaaattttggcttggacttcttcatattaacggagggacccggcttaggtgttattgatggctaaatttgcaactaaatgatgatttttcactccagatgagtatatagttgatttctgagttgtccaggggtacattttgcattttgccttattgagattgttcacttatagaagatgaaagcaaatgtggctggttttaatgagaataacaggtgtacttacagatattatagaatatgtaagatatatttacaatatgtattgtaatattttaatataatagaattatagatatacttgccttcagagtataatttttctgttgctttgctatgctcagcagtataccaggaagagataataaaaatcaaattgtatgattgaagtagaattcttttaaattttccaaaaagatgatttctatggcttaatgtctacaggtgatgtgctcactgaatacagtattaaagcattttgtccataggacagctacctttccttctgctctgcatgcagatgtgatttattctctcacatgatttaatacatatgtaaggtctgctttttactcaggagtggcattatttaatattgccaataatatttttcccccaccttaagaaaacaagaagcagaggtccagacctaggaagccacggaagactagaaatgaggaaaatgagcaggatggagacttggaaggccctgtgatcgatgagtctgtactttcaacgaaggagctgctaggcttacagcaggctgaggagagactgaagagagactgcattgacaggctaaaaagggtaacatccttatatatatatttgttggttagaatcctggttttagcctcaattttgttgttaattgagtatgcatgctctgatcaattagatatcctactttggttatcagtatttaagcactacaagttaaaagtgatgtccagtgtgatttaataggattaggagtcattgctattatacttaaaatgactgttagggtagtgataaagggaacaataacagtagcaattttaaaagtgaagaagaagccaggcacagtggcatgcctgtagccccagttacttgtgaggttgaggcaggaggattgcttgaactcaggagtttggggctgtagtatgctataatggtatctgtgaatagccagttcactccagccagggcaacatagtgagactcctgtctctttagagaaaagaaattgaaggggaaatcatttcctggctgattttgtttatctgaatgtttggttttacttatgtctctctctaaataaatctcttcaaattatagcgaccacgaaactaccctacagcaaagtacacctgcagactctgtgatgttttaattgaatccattgcatttgcccataagcatatcaaggaaaagaggcacaagaaaaacattaaggtaaattgaatgtaacccaaacaagtctgcttacttgttagttgttattacttgtcatctttgtggctttcttctccttaaggctatgatattgataactttactgctttatttattgaatatatttgagccaaaatacataatactggtcagatgtattttactggttaatcttgtgaatttccttaagggcagcatcaggttatatgaagtcattgataggacccaggtatatgtccttatactagtattaaagcaaacaatgtttgtaagtgctgtttttaatattctttccttacactttctccttatgcccacctatcctctgttaccactgatccacattatgtgcataaggaagtatgtatatgtttgataggatgaaaactaacacagctaaaatgagaagggagggctaagaaaaagaaaactctatagggtgttgtcttcatgagtggtagaaggtcaaaactatgtgtaagtcatttttaatctcaacatttgatcttaaaaggagaagcaagaggaagagttgctcactacgttacccccaccaacaccctcccagataaatgcagttggcattgccattgacaaagtggtacaggaatttggcttacacaatgagaacttggaacagaggctggaaattaaacgtatcatggaaaatgtgttccaacacaagttaccaggtattttctagatttgtttttctatttaactacctaaaagtacctcattcatttctcctaccaatagtaattttcatcaaataaaaatttatttaccatgtcatgaa

SEQ ID NO: 480 - DNA, 275 bp, Homo sapiens
agaaaactctatagggtgttgtcttcatgagtggtagaaggtcaaaactatgtgtaagtcatttttaatctcaacatttgatcttaaaaggagaagcaagaggaagagttgctcactacgttacccccaccaacaccctcccagataaatgcagttggcattgccattgacaaagtggtacaggaatttggcttacacaatgagaacttggaacagaggctggaaattaaacgtatcatggaaaatgtgttccaacacaagttaccaggtatttt

SEQ ID NO: 481 - DNA, 9556 bp, Homo sapiens
ggagcccggccgggacaggaagaggctggggaccgcggcgaaggtggtgagtgctcttgggcgccttctcccaacgtccctgccagactcgcctccgggctgattctccagttggtttcctggactccagagtagctgtccggcctggccccggaggtacgttggttccatcccccgccggcctcctcgcaccagtttgggtgaccgaggaacccccaggccggcagaggctgagccctcgggttcgagtccgtgttttcactttttgtcagactgcgggcgcagaagacgggatttgggtcaagacattcggctctggccccctggccggccgggggaaccctggaaccccatggagacagcaggtcacttcctgcttcctggtccccacggtggcttcttggccaggagtgcagggacgcctcctctttctccacgtcgggctcaaaagggtggaaactaaggcagatcggtggtggagcggtcagatggggattgaagaggagtgtcattcctcagggaattgctgttcctgacaaaaccaaacttgtttggggttggagaacggggattgaggaggttagatggagttgtcccttgatcggaaacccagcctctttaattacagctgcaccttggtcggaagcccagcccctccgtaacctaagcgctcaaagccggtctgtccagaataggggtggtgaagggacggaaaattggagttgagaaatgtagtactcctttcacgtaaagtttcggtgtataacacttacaagtaattgccaacttaaaaaacaaaagactgtttcggtagtttagtaataatattggcttgggatgaggttttctttgaagagaaacgccttgttacagagggaaaagccgaccatacttgatatgagtaatattctactatgctacagttctggaacctatagagcttctcttattcacacatttaatcttcatgctaaatagtaagtattaattttcatgaagaatattagaggaccaagcctcccaacctctagggtaaagcactgattattaagaatgtgatagaatttttattttaaaaaaatagggagtttctttcttacaggctttggggcatctgtacgataaattgttattttgtatacttgtatgatatcttgttatatagtttgatatttccccaaaataccttctttcaggtgcaaagtaagaaaattgaagtcaaagaccatgggagatacagcaaaaccttatttcgtgaagcgcactaaagaccgggggactatggatgatgatgacttcagaaggggtcacccccaacaagattatttaataatagatgaccatgctaaaggccatggcagtaaaatggaaaagggccttcaaaaaaagaagataacaccagggaactatgggaatacccccagaaaaggaccatgtgctgtttccagcaatccatatgcatttaaaaacccaatctacagtcaacccgcttggatgaatgacagccacaaagatcagagtaagagatggctgtctgatgaacatactggtaattcagacaactggagagaattcaaacctggacctagaattcctgttataaaccgacaaagaaaagactcctttcaagaaaatgaagatggttataggtggcaagacacaagaggctgcagaactgtaagacgactgtttcataaagacctaacaagcctagaaaccacgtcagaaatggaagcaggaagtcctggtaatgttttccaacttgtcagatcacaaccccagagtcagcaatgttttattctttttcatccaaatgagttttgttattttcagcaatttagtttcagtttttcacagtttctgttttaagaaatggtcacttagtgtgattattttaaggatagtaatcatgatatttgagcagctaaaacacatttcatatgttgatccctttaaaagtttactttgccccagggctcactttacgtcagtaaacatgttttctgtaacgtgttttttacagaagagggtagctatatgccccaggggaccatatcgtaattgctcagtggtttgtgtgttttcaaaattgtgattataattttgtatttgaataattaatgtgttcataatataaatgacagaatataaagctttttttaaaaaaaaaacttatttgttgatgtaaaaacacagtatacactgcgtatatctcctgccacaagagatatatcttttggatgtagtgtcagtgtcccgagatggataatctgagatctttgtttttcaaaagggatcgtgacaaacaggttgagaaacaagtttagaaagtcagaaatagattcaagctttgctgtttggtttcagtaagaccaaaactaatttctcggtgccctcacatgcttggttaattgccccaaagggataataaggagataatatgtttttctaaaagtaaaaagtagattttatccatgtggcaacgatttctgcaaacaggaaggttatttttatctaatgggagatatataccgaaatgaaataaagtcacaaattggatggaaaaaatgaaacaatatcacagttggaaacatggacttgtaagtttagtggctgaaagcgttttttagtggttgtatagaatgtgtttcaaactggccagcacttttaaataaatttttttagtttaaatgcattcagggaatatggacactttctagatcacccgatgccttttctcttcatgttatctcacagtggccagttcatacactggttacctataaggtgtttgaatttgtgtcccatgcgtatagaatacttaaaagccaaaaggtcgtcttttatctttacaaggtcttaggataaaaatgaaagtctcaagcacttattaatattaaatgggggaaaatgtgctacttgattttttttcttttttcacagatacttctagttgtcagatctgtttatttatattttattttattttttgagacggagtctcgctctgtcacccaggctggagtacagtggcgcgatcttggctcactgcaacctctgcctcctgggttcaagcgattctcctgtctcatcccccaaagtagctgggactacaggcacatgccaccacatcaggctaatttttgtatttttaatagagacagggtttcaccatgttggcctgactggtctcaaactcctaacctccagtgatccacccaccttggcctcccaaagtgctgggattacgggcgtgagccaccacattcagcctgatttttttttttttttttgagacagtctcactgtgtcacccaggctggaggtgcagtgatgtgacctcctctcactgtggcctctgcctcccaggatcaagcggttctcatgtctcagcctcccaagtagctgggactacaggtgcacaccaccatgcccagctaatttttctgttttttaatagagatagggtttctccctgttggccaggctggtcttgaactcctgacctcaagtgatcgacctgcctctgcttcccaaagtgctgggattacaggcgtgaactaccgcgcctggccctcagatatttttaaatttgaaaattaagagtatatattaatatcaagtagcagaaacagaatgaagtgttataaaggcgttaagtagtagggagacataaaacttaaatctttaagctagaaatagcttgaggaattatctgatgcagtactctgttgtaatatatcaaaaatggaatcacagttttacaaatcaggcagctgcagctcagagaggttaaatttccacagacctgtttatgcagcgcggtaaatgaggaagtagaactaaaattggggactctgctactctggccattaactcagcctcgctggacctgaaatcctgacggcggagccgaatatttcttgataatttctgggcttttgatttgtgtttttctttattaaaaattgtgtatatttaagtgtttctgtattactgtccaggtgggatgtgggtatttaattttgttacctatagtcttgtagaagttgatcttgaaaaccatttcattttattattattattctcttttttgagatggagtctcgctctgtagcccaggctggagtgcagtggtgcgatcttggttcactgcaacctccatctcccaggttcaagcaattctcttgcctcagcctcctgagtggctgggactacaggcacgtgccaccacacctagctaatttttgtatttttagtagagttggggttttagcatgttggccaggggtagtctcgataccctgacctcatgatctgcctgccttgacgtcccaaagtgttgggattacaggtgtgagccactgcacccggctgaaaagcattttaaaaagaaagtttatagatcaaaaatttgcaactagacattaaaaggaactgttggctgaccacaaaaacttttatatgttttcttattttatgtgtattcttataaaagcaactaaagaagttgcttttaagtgtatttgaataggaaatgcattttgctatttttttattggaggtaattcaaaagtttgcatgtttttgctgtatgacatacaggtatatgctttcacagttattaagtaaagaattattcagtttctatcccttgaaaatcttcatataggaagcattaagcttcggtataacattatttagtttagagagattcaactgaaagtataaactaaaaaggatctcattaaagagatcgaaatttctttatcaaaattgtgtcttaataaggaagggtattattcaacaatgtgagaagatataatggaaattatggtggagttgcttttttcccccccacatacggtactaccttctgtttttttcagctctacattactgcccctactttagccttcaaatgtcctagattgccagtttaatgtatttgggacattgccattaatgatcttagctggaaagcatccactcaaatacacatgtcctttgtgaaccatatgcaaataaaatatgggaaacttggaatgccgaatatagagaactcttattacaataaatctgaggtaagccaggtagtcttcctccaagtaattatgagaatttttcttttttcttttttttttttgagatggagtttcactcttgtcgcccaggctggagtgcaatggcatgatctcggttcactgcaacctctgcctcccgagttcaagcaattctcctgcctcagcctcccgagtagctgggattacaggtgcctgccaccacgcccagctaatttttgtatttttagtagagacagggtttcaccatgttggccaggatggtctcgaactcccgacctcaggtgatccacctgcctcggcctcccaaagtgctgggattacaggcatgagctgccacgcctggccaagaatttttcatcagtacctagctttaccctccaagagtccctccggtgagattttgacagtttttaccatgcatgcctgtgaaagtaggtttagaaggttatattgcctttcagtgctagtccactctagatgtgaatgggtatgttccaagaagggattttagtaatttctttccagtttttatgttgttagttagaaggctgaatttcaggatttcatcctttttttgtttgtttgttttttagacagagtctcactctgtcacccaggctggagtgcaatggcgcaatcatgactcaccacagcctcacctcctgggcttaagcagtccttccgtctcagcctcctgagtagctgggaccacaggagtgagtcatcttgctggctgatttttttcatttttgctagagatgacatctcactatgttgtccaggctggtcttgaacttctgagctcaagcagtcctcccaccttaccctcccaaagtgctgggaattacaggcatgacccactgcacctggccccatccatattttaatctatattttcaatccctttactttgatttagccatgtgttcttggagaagttattctcttggattcgcattgtccccatctgtacaatggggacagtattagcaggattgctgtagggattaaataaggcagtacatataaagtgctttacatctgttgcataataagatacaccatcatggtagctgccattatctgacagaatttctgcagccatccacttctgtataaaagcagtaggagttgattgaggtctttggaggaagagagaagttactctttctagaaaatgacagcaaatatggttatatggagaaacctttgtgaccagaagagaggaagagtttaaaaaaggaattcggttccctatcacttactggcttgtgaactaataggggcttttctaaagggtattgcagtattattttaaatttatagagtttttgcctaagaaacctgtaataaacactgaagttagatgcagtttttttgataatgtttataatgataagcaaactaaatgagaatggatacatctctaagtaaaagaagtgcttatctgaaaaaaaaaaattgttcagaccagaaatactggccttaaaagattatgataatttaattgggagtcgggggagtattaaaaaggaaatattaaggtagcgcaaggtagcctgattttctgttgaaatgacaacttaccttttagtattttatttgttcagtgtattttgattgattttttaaaactacttttccaacactttaattttttttaattttttaattttcttatattgtggaaggtgtttgcagaattttgagatagtcatctcaggtagttttagcacaatgcttgctgcttatcctttagcgctctcagcaagctttttataaaattggaggtcctatatttccttttcagcctgccagttcattgtaattgccatactagtagtaatgagttcctctgaaaacttgatggaggaattacttcatgtagggcttttcagtaggtttatgtttccaagcactaatgtgttactaatagtttcattttttaaaactcgatataagttatcaaagctatctaaaacaattttttatggtttaatcccacaatcactttaacaagttgaaaagttataagttttaaaaaggaacaggatgatttttattcattataaggattatagaactaatagcagagtttataaacaaatgtacttagagaaaacttttgtttcaatggccagttgtttttttcctttgaaatatgctcagtgtacaggccattcaaagaagctaaaatgaaggtaaaggtaaaatgagagatagttgtccttagtaaataaaattttggcttggacttcttcatattaacggagggacccggcttaggtgttattgatggctaaatttgcaactaaatgatgatttttcactccagatgagtatatagttgatttctgagttgtccaggggtacattttgcattttgccttattgagattgttcacttatagaagatgaaagcaaatgtggctggttttaatgagaataacaggtgtacttacagatattatagaatatgtaagatatatttacaatatgtattgtaatattttaatataatagaattatagatatacttgccttcagagtataatttttctgttgctttgctatgctcagcagtataccaggaagagataataaaaatcaaattgtatgattgaagtagaattcttttaaattttccaaaaagatgatttctatggcttaatgtctacaggtgatgtgctcactgaatacagtattaaagcattttgtccataggacagctacctttccttctgctctgcatgcagatgtgatttattctctcacatgatttaatacatatgtaaggtctgctttttactcaggagtggcattatttaatattgccaataatatttttcccccaccttaagaaaacaagaagcagaggtccagacctaggaagccacggaagactagaaatgaggaaaatgagcaggatggagacttggaaggccctgtgatcgatgagtctgtactttcaacgaaggagctgctaggcttacagcaggctgaggagagactgaagagagactgcattgacaggctaaaaagggtaacatccttatatatatatttgttggttagaatcctggttttagcctcaattttgttgttaattgagtatgcatgctctgatcaattagatatcctactttggttatcagtatttaagcactacaagttaaaagtgatgtccagtgtgatttaataggattaggagtcattgctattatacttaaaatgactgttagggtagtgataaagggaacaataacagtagcaattttaaaagtgaagaagaagccaggcacagtggcatgcctgtagccccagttacttgtgaggttgaggcaggaggattgcttgaactcaggagtttggggctgtagtatgctataatggtatctgtgaatagccagttcactccagccagggcaacatagtgagactcctgtctctttagagaaaagaaattgaaggggaaatcatttcctggctgattttgtttatctgaatgtttggttttacttatgtctctctctaaataaatctcttcaaattatagcgaccacgaaactaccctacagcaaagtacacctgcagactctgtgatgttttaattgaatccattgcatttgcccataagcatatcaaggaaaagaggcacaagaaaaacattaaggtaaattgaatgtaacccaaacaagtctgcttacttgttagttgttattacttgtcatctttgtggctttcttctccttaaggctatgatattgataactttactgctttatttattgaatatatttgagccaaaatacataatactggtcagatgtattttactggttaatcttgtgaatttccttaagggcagcatcaggttatatgaagtcattgataggacccaggtatatgtccttatactagtattaaagcaaacaatgtttgtaagtgctgtttttaatattctttccttacactttctccttatgcccacctatcctctgttaccactgatccacattatgtgcataaggaagtatgtatatgtttgataggatgaaaactaacacagctaaaatgagaagggagggctaagaaaaagaaaactctatagggtgttgtcttcatgagtggtagaaggtcaaaactatgtgtaagtcatttttaatctcaacatttgatcttaaaaggagaagcaagaggaagagttgctcactacgttacccccaccaacaccctcccagataaatgcagttggcattgccattgacaaagtggtacaggaatttggcttacacaatgagaacttggaacagaggctagaaattaaacgtatcatggaaaatgtgttccaacacaagttaccaggtattttctagatttgtttttctatttaactacctaaaagtacctcattcatttctcctaccaatagtaattttcatcaaataaaaatttatttaccatgtcatgaa

SEQ ID NO: 482 - DNA, 774 bp, Homo sapiens
  SITE (712): n equals a,t,g, or c
aaaacaagaagcagaggtccagacctaggaagccacggaagactagaaatgaggaaaatgagcaggatggagacttggaaggccctgtgatcgatgagtctgtactttcaacgaaggagctgctaggcttacagcaggctgaggagagactgaagagagactgcattgacaggctaaaaagggtaacatccttatatatatatttgttggttagaatcctggttttagcctcaattttgttgttaattgagtatgcatgctctgatcaattagatatcctactttggttatcagtatttaagcactacaagttaaaagtgatgtccagtgtgatttaataggattaggagtcattgctattatacttaaaatgactgttagggtagtgataaagggaacaataacagtagcaattttaaaagtgaagaagaagccaggcacagtggcatgcctgtagccccagttacttgtgaggttgaggcaggaggattgcttgaactcaggagtttggggctgtagtatgctataatggtatctgtgaatagccagttcactccagccagggcaacatagtgagactcctgtctctttagagaaaagaaattgaaggggaaatcatttcctggctgattttgtttatctgaatgtttggttttacttatgtctctctctaaataaatctcttcaaattatagcgaccacgaaactaccntacagcaaagtacacctgcagactttgtgatgttttaattgaatccattgcatttgcccata

SEQ ID NO: 483 - DNA, 332 bp, Homo sapiens
attttttcatcttcccgtttccttcctcttctccaggacttccatcttggaggagcaggaatatggtttatcatttgagagtgatataagtcagcaaatacagaatatctgttcttctggtgctgtattccgggagaaagccatagacccttcctcttagggagctgagataggatagtagggaggcaggaaggtagaaatacacatgtattctgagtgccagggtggacacctgcatgtgagattgttgatacaacaagagagggagtgggagttctcctgggcgggtcttgagctgagatttgaaagaggagtgggtgttttgttgtatc

SEQ ID NO: 484 - DNA, 399 bp, Homo sapiens
gcaacatcaaaggtcactgatgacacatcaccataacagatataataatgaaaaagattgaaatgtgagaattaccaaaatgtgacacacacattcaaagcgagcacatgctgttggaaaaatgccacagataggcttggttagcactgcattgccatagaccttcagtttgtaaaaatgcagcatctttaaagcacaacaaagtgcaataaaatgaggtatgtccatagtactatgttaaacaacaattagtaaacacttggatgttatcagagcagcaggatttaaaacttcttaaaagccccgggtttttttaaagggctttttacctcctatcatttgctctcattcagggcattctgtttcagctattgtctgacagtgacttttactgatttt

SEQ ID NO: 485 - DNA, 153 bp, Homo sapiens
ggagagttgagttttggatattccgatgggttgcaaaaaggtactgtgctttcctgggttctttcaaattgtaatcagccttttatgtgcctgtctgacccttgatgttaggattgtttgaactgatactttttgaacattttctcaagttta

SEQ ID NO: 486 - DNA, 256 bp, Homo sapiens
gaaccactgtgctccagcttgggcaatacagcgagacctcatctcttaaaaggattaaaaaaaaggataaagactgtagcattttctcatagagtattctaagctttataaagttatttccccaacgctttggacataatgattaggtcatttgaagttctgagaaacagaatgattatggaagttacttaaaactacttcttaaagtataagaatattgctaggcgtggtgtaatccccactatttgggaggctg

SEQ ID NO: 487 - DNA, 256 bp, Homo sapiens; identical to SEQ ID NO: 486

SEQ ID NO: 488 - DNA, 258 bp, Homo sapiens
tttttttttaaatctgagaaatactatcacttgatttcaaaaatgcacattgaattagtatgaaattgagaagttcagttacaggtagtcgatacagacctttgtggaaagagtgtggaattttatgaacaaaataaagacaggtggggcgcagtagctcacacctgtaatcccagcattttgggaggccaaggcaggagaatcacctgagcacaggagttttaggtcagtctaggcaacaaaatgagaccgtgtctc

SEQ ID NO: 489 - DNA, 258 bp, Homo sapiens; identical to SEQ ID NO: 488

SEQ ID NO: 490 - DNA, 11216 bp, Homo sapiens
tttgatttaaaaatttttttattcaaatattaattttatcaaatgaaacaagaatctttgatgatactttgatgtaaaaaaatgtttcattcatgtgtttgcactttccatggtttaatttgtttagggtaaattgtccaacctgaaatataaattatccctttgcttaatatactctttatttcttcagaaacaaaaaaaaggtaggaattagttcaaggatgtcaatttactgtttctagtactaaagtacggctaactatgtaatttatagcctttaagtgcaaattatggcatcagtcagtggttcccacaacagacccaatcacactttcatactcaaaacacagtatattcttttgcaagtaaaaatatataaatcaagtttcaaagaacatcttttcagtgcccctcaagaatagtttactcagtttgttgatactttctctcctgccagtcttcagtcattaaatacctctaacttagagaaggcaaaatgaaattcaaaacaatttgaatgcttacaggcaaatcctgggaaagaagggaaaataataattcaagtaacatttctgtgaaactaggaatatggctcctgtgtctgcccattctctcaatttggtagaaagggaaaaataagagcttgcttcagaacagaacaaaaagaaaaaaatgtctacgactaggtcatgggtttaaaaaaaaaaaaagtacaggctgacaaacactactatataaattagtcaaacattttattatagagtatatatttatatcaaaagcacaaaaacgtttattctgaaaaccaggaagattgtgatgttacagaagaagattcaataattccagtccatttctagggtactaagtgtctgatcacctcagcgaaaacaagatacaaatgaggccaaggtcacaggtctggccaccctgagtcccttcgcactatttggtttctcaagttgagacacgtattcccagtcccagttagccaccttccaagtgtttgctactagccttaatgggtacttagccaaagactacacccaaatataaccaaagcttatgttaagtcataagattaatccttcaataataaggatagcataattggctttgttacctaattctacataaacaaaatcatcaaatatcctggcataactgaaatgacttacagaggaagtagtaaagcttggaagtattctatggtaactgagctgaaaaaggggaaatgccaaatgttgtaaatgccatcattaccaataagagtcaccaaattctcagaaataggtaattggcagctcaaggcagttagcactacaagatttctcttgcctttaaaaaaaaaatcatttttaagactccttttttaaaaggctacatcaaaaaataaaccaaaataacaaaaattaaaaggcaacatgagtaaaataactacaaatttaaaaatcagattattattcctgtttgttcttacaagccattagtattcttttaaaacttactccctgagagatcccagactatgttaagaaagagtgagcttgaagttattcttatttaaaaagaaaatctatattagctcatcacatttgatattattataactcttaaagtcagcagggtaaaatcaaattctaaggaatatagttttgagaataatttgagggtaaatgtaatgtatatatcaaatttgtattatagtcaaggatttaactgatggtgccgaaagtcaagtatttaagagttaagacttttaaaaattgtaccccccaacttatttagtaaagtacattaccaactactgatttattgcttttaatgtgatgaaacaccaaatttgacagctaaagtagcagtgggatacaagtatgtttttatctttaatcatttttgtagaataggacatgtacatatccatataaaaagagactgtagcagatgcctcccagaatcaaccagttcttgtaaacattgcatttgtgcagattttcatacttgattccaaaattgagaacaataagattaaaagcaaatttagtagccacaaaaagtccagtttgacttcctgcaacatatggtaccactcttctcttcagaacaaaacaaaacaaaaaacctagcagcacattaaaaaaaatttacaaaacatttcagtactctttccctcccatcaaaaaccgaacaaaaataaagtgcagcacccataaaagtgtcaagaaaatagccaagttcttcctttcttgtaacaaaatagcacttggcctcagcagtcttaaccaaattatacagtgtccatcattttgggttcatcatcttctttatgtaccaccgagtttaagctgcagagagctgtactgatagaatactgaagataatctggattctggggaaaaagaaaaggtagattggggggagaaaaagaacgcattataaccagttttatgacagtacatacatatatattcagtttcaccgtcctatttctctgcagtgtagtagagcagtaggaaagaagatggactttggagacagacttgggctgaatcccaagaaaataaagaaaaaaataggatgctatcacctatgagatgtgataaaagaatgatacatgtaaaaaacagaaatgttaacaaataccacctttcttctctgtttaatcatacaaggcaaggctacaacctccatgtgattatatatacatagctactgataatttaaatatggtttgaagttagcaatgcatttttaagattaccatctaattacaacagtaaatactaaaactgcaaatcatctaaataaagaaaaaatttactgggtaaaaattatggatatcttcagggtctattgtggtttcccaaaggttaaaacaaactcagtgagaaatctgtacacttttgagatgtatttacacccttattttttaaactgagaataaaacaacaggatttgttaaacaagcataaactcataaatgttatgcttgtcaatttcaaaaactgggaatagaaaacataaaatcttactcaataaatgcaaaaataaaaccattattaaagcaccatgaataagggtatagcccttaagacccagaactttagaaaattcttccccaattcaattttgtctactcaattgttccgaatatctgctagttacttaagacttttaccacttgtattactagttttacttatatttattttatttaataaacaccagtgaggacagtagtcaaacaggatagatgtcttaaacctcaccatccaataggaggttgggaggcagggttttctaaagatcctcctaagaaagtacaacactttgtgagattcctttattctaaaagtcaaaaagctagctggagttcggattattcccaatcaggtctttatgaaggaagtagcagggacaactgactgaggtctgggacactcacactgggcttcagttttaatcctgcctctatttagtaaagcaagcctcaaggagaacaaaattcacaatttagtaaaattaaaaactagtctacaggataaacctaaagttaactgttattatttctatatccaagaggccttggattagacctctcaaaactaaggataatgaatggtatttggcttatttcacacgattgctgtcaattattaaaaaaaagaaatgaaaagctaaatggttacccacacttaagctttatcaaaaatgaccaatattattgttacattgtctcattctccaaaaaaacagctttaagacctttttctaacaatccaagcctaattctctggaacagagcttacaattactctattaagactgggctccagttttccatggcacaacttttaataacagaattggctgaggagattctccaaaactcatccacccatcttcctaagaactgtaagatactatcatacagagactttaaaaaataagaaggaatcggtatacccgacctaacctacacttagatttcattgactgtcccatattttcatctagtaacattctcaacacatatgattcacagtctgtggtataggtgaataagcagtgaagcataatagaaatccaaaagtagaatattagattcatcacttattgtgttgacctcaggcaaatttcttaagttctatgaatttcagtttactcatctataaaaatgaatgaaaatgaatcacagggtgtttgagaaaattaaataatatgtgtgaaagtgctttacaacatataaactgatataaaaatgggatgttattattatggtaagatttttcttccaaacctctaaactgatgatttggtctttcaggtggcctctcattttacttccctcaactagtcgataatcctttccgcacatgtagcaagcatctaactgaaattttctccagcccttgtatccttcagaaggaccacatcaggatgctcaaattacttaccataaggaattggtctcccaccatgaggagattagcccagcttaattaaatctgaataaccctgataatatcagcaatacagaagtgtcagaattgtataattctagtccccccatgactataagggatgcctagcacctgatatcagttgctatctaatatatagttgctatctaataacaacaaggacttacttctctcaaaccagaggcaacttcttgataatataggcttaagatactataatgtgtatctttccctcttatatttagaatcagttacatccttccaaagtctcttttctccttcccatgcattatgtgacattttaattgcaggaggtttatatattggatttcacagtgacttggtcacagaattcccctggaaaaactacttccctatgggctatttcttaggaactgaagagaaaaatcatcactgaatttaaataaaattaagagataatctgtaggaatttgtagagggaatattctttacatgtctaactaagggggaacattactaattatttaaaaatcaaacattaattatttccatccttgagacttttttttttttttttcagccagagtaggctcagagactcctgataataatatttttgactggggtaaatatgatcaatcactttccttaaaggacatacatgtaattggaatggtgaaattacagtgagataaggtcaagccactgaaaatcccaatttttagcactttatgaggtttaaaactaaatataggactctcctcacattgtcttttgaataagactttccttctcacaatgtagacaacagattaaactggctaaagctggtcttaaaatcttggagcctggaaatgagagatgactgggctctattaaagtgctactagtaaaatcaaatgggtaggaattatctaataataacttaaacttgtaatcctaactagcatcaggcagaccagtggtctgatcatgtctcctttttgatgtaaattttttcatgctgcctatatgacatgatttttttttttttttttttttttttgagacggagtcttgctctgtcgcccaggctggagtgcagtggctcgatctcggctcactgcaagctctgcctcccgggttcacgccattctcctgcctcagcctcccgagtagctgggactgcaggtgcctgccaccacgcccggctaatttttttgtattttttttttttagaagagacggggtttcaccttgttagccaggatggtctcgatctcctgacctcgtgatctgcctgtctcggccttccaaagtgctgggattacaggcgcgagccactgcgcccagccgacatggttttatcttgatcaaaccactgaagacttcaaagaggctcaaacagttggccagtattaccagatacaatattatcagctacattaatgtgttctaaaaatgttatatctggtagacccaacatttaacaagaaaatactaaataaacttaagcaacagatcacactggttccatgtgcatgtccactttgaagctaatcatcctaaaaaattcaaaatggcatagttttaactcaggatgagatgttttaaggaagctcctgagggagccatcttgaagagtttatgattgagatgatcaatagctaagatttgttcttaagaatggttaggtataactaatcactactacattaaaaggagaggaaatctggtatctctaaatacttaagaggtgagattcagcaccaaaacatggcatgaagtaagattcaacagttatcttctgaggcaggaatatttaaaatagtagcacatattaaaaaaaaaaaagagtggggcaaaataacaaaaattatgtgaattaataggcttataaaacaaatatttacttttccaacttacctgtggtaaggattctaataaacctatagatccaacaccagaatggggaacatgattctgaactgtcataggttgaaaactttgtgattgagaataaagtcttactcttgacttgaaagcttcaagttcatttttgaatgcttcaaaataaccttcttcctctgcctagaaaaaacaaaaaaaaaaacaaagactgtgttcttcaagatttctagacatagtaaattccagaaagcatataacaggtttgaagtggaggaagtaatgacaaggtgaatagtctaaatatagaaaccaccacgatccctgtcacatttgtgaaaactacctgatttataggaacattaataattggtttgctccatttccttctgcttcagcaaaataagctaataaaaaacaacccctccctatgcatatgcacacaactaaaagaaaagaaggctttctctgtattttccttgacttatctagatccttaacaggatccaaaatagtcatttaatctgtccaattcattctatcttcttcctactaccaaacaatcaagggatattcttaaaaccttttaattctccaacaattaatgagggggcactattacctgttcctagtaattttctaactgtatattccctacttaaaagagctacgaaaaccaaatagaattcaatagtcaacgtcattatggaaccatcttgctctagttaagcaagtaccttcttttcaatattatggaaagaaaaagtatgataacttaggtcgagggagtggaactcttaggcaactccctattggcagctgcctctgtttatgtttcctctgaatatagagaaatgatacagagatttatcctaccaatagaatgcaggctttaagttcaagtagtggaagagatcttgtcaaatggattttaggttgcgtaacaggttaaaacctgtggattagttactaccatcagcttctattgaaataatgcagagagtgttctgtgctgccatcctatcttcttgtaaatttaggaagaatttccttaattacattttagcacctcactttataagaacttgtgtggacacagagtatgtaatatccataaggattctttctgaaaattaagaggcacaattgctgtcctcattgcatgcttaaggtttagggatttagatatagagtgatgacagattttgtattattaagtaatttgtgggccacttacttaatttctttatgccaatttcttcacccataagatagcaacagtaatcctcataaaatgttatatgaatttaatgagttaatacatgtaaagtgcttagaatagtccctggaacaaagtaagcataccatgaaagtgattatttcataatttaaaaaaaagtattattaagcatacaatgttaagattgaagaccagtgcctttccgttttactttggtaaagtaaatgtcaaacaatatatatgatttggccacattccattattttattaaacaccagtttaaacacatccattaatgtaagataaaaaggaaagtatgttttttactactcttaagtgtcaagtaaaaatttagaagagaccgggtgtggtggctcatgtctgtaatcccagtattttggaaggttaaggcaggaggacagcttgagcccagaagttcgagaccagcctgggcaacacagtgagaccgtgtctctacaaaaaattagctggggatggtggcatgtgcctatagtcccagctacctgggaatctgaggcaggaggattgcttgagcccagaagttcaaggctgcagtgagcaatgattgcaccactgcactctagcctgagtgacagagcaggaccttatctctaaaaacaaacaaaagtttagactagtcaccagaagcagcctagctaaaatatcaagtcaagcatttgctattaaagttcaactgtttcaggaaaatttcatattttggttgcatttcagaagagtttagggtatttaagttaggactactgccacattgagagtttttttttaatataaaaatataattttatgtttataataggaaatgttcattgtagtacatgaaaaagaaaacggaaattatttataatttcaccacacaagtataaccaaagttaaacttttggtatacttccttttaacttctaattgtatatgttcaaatatatcctatgtgcagaagagcatgtaaaagatatgcgcacagtttattcagcaaaacccccactatttacccatagaaattaggatatggatcattactaggatcctagaaaccagttcccaagagcattccccctccctccctgaggttatcattattgtaacttttgtcttcttaattattcctttgctttttagttttactgcttatatatgtatccttcaacaatatattatttagttctgcctgtcactaaaaaaatactttataaaaaaatacaaaatacgaacattgatactagatatatccatttagcatctatctaaacagatacatcactctgtggtttgtttgattcactctcttgtttttccatccatgctgatgttggctagtattttacagaatgaatatacaggttgaatatctgaaatgcttggcaccagaagtttttcagattgtcagttttttcagatctgggaatatttgcattatacttaccagtgaagatctctaaattgaaaacacaaaatctgtgagtatttcccttgagtgtcatgtcgatgctcaaacagttttggattttggagcgttttggattttggattaggaatactcaacctacaccacaatttatttattgtttccaggcttttagctattacaatctactatgaacattacggcaatctagtacatatgtgtaagagtttctctagcgcagcagttctctttacagtcttcaaaattattgaggaccctaaagagcttctgtttatgtgagttgtatctgtcagtatttactgttagaaatgaaaactgaggaatttttaaaacattaactaaaaataacaatgacaaactcattacactaccattaataacatttttatttaaaaaaaaagttttccaaaacaaaaaaatttagtgagaagagagctgctttttcctttaatttttctaaatctaatgtctgactttacagaagatggctagattctcatatttgtacttccgcattaatctctattgtacactactgaggaatgaaaatgaaaattaaaaataacatcttggtattattatgaaaatagtttcgacagagaacctcctgaaaaggtcttgaagcccctccgggttcctggaccccaccttgagaatctactctctaggatgcatacacctaggagaatttctgggtgttaaggcaggcacttgttcaactttactaggaaattttttaaagtggttgttccaatttatacttccactagcagtgaacgcaaattcttattgccctacttcttgggcagcttttaaattactgcaaatcttgtgagtgtgaaaggtacttaatctttctagacatctatttttcttcaacatagccaacatcatctagtatgtactgcttcctgtgaattcatagcgtaagcatttcttcagctcattacaaaagttccataaatataattttaaagggtgcatgatattctatgtaccatgggtatttttaactattcccttaattgctgaatttttaggttgcttcctattttttctttataaaagtctgatttctcattaaactgctgagttctacacatgaagaatcctgtatctattttgctcaataatgcatcctgagcatctgaaacagctgtgctttgcattaggcactcagtatttactgaatgaattaatgatggaacgtaagtttcctgaatacacacattcatttaaatgggtctcaatttcatatacatgctgtagtacagcctcttatatagctcttttaagtttaaattagcaagaaattagcaatataaattttcttttcacaagaaaatctacagaatttagcctgtggcatcctgcttggatgccttctattgatatgaacagaacaaagaggtctcagctgggaccaaatcttcccatttatcaatatcaaataactacttactttggctttctggaaaaataaacgaaaacaccctcttggatccacattacagtttttggccatttccataataaactgcattacaacagcttgatgtgctatttgttccattaaagcccctttctgaaaaagatttaaatgatataagaaacaaatatataaatatatttaattggcatactgattcaaattttgaatttttaaaatacttttgattttactctcttaagttataagtcaaatactttacaaacatataaagagtatatcttagttttttttttattatttgtatgtggaccagaataactaaaggaagaccatgctctgaacttgatttaataccatgattaccgtctggatttttaaaatacgactttcaaattagtttgaaaaggattatagtaatatgaaaacaagagagatggaggtggagtggcagagaaagcatagtggaaaagtttctgtatgctaactgaaacaacaacaacaacaaaatcccacattaaactcaagtagatctggaagcaaaaaatggtaattccatctaatgaccttcctgctttcttttaaaggacttaatgtagaaaacaaaacaaaacatcaataaagtatgaaatcagatttccactaaggttcccagaaactcaaggttcacataataataccttctcagcttccaggtgaaaacaccat

SEQ ID NO: 491 - DNA, 755 bp, Homo sapiens
agctgaaagaaaagctcgataatggggaaacagtgttttttccttcaattaatgattaatttctcagctggtggggccagcagtctctgaccgtcacgtgacagctatgcgccccatgacgcctctccagggaggcagagtgggtggcactgaggtggagctcaccttcctgaaattcagccccctcagtttggaggaaggaggtaaactgtttcctgtccagccagaagtttgcggaggccttccccaggccaggcaatgctgcctgcgactctgtccctgacagcgttggatgcaccgtatctcttctgatattaagtctggaagtgatttactatccgagtcctcccacagttcgagccttttgatgtactttgtgtgcatgtgtttctgtcacatacgtgccacagtggaacagattttgttttgacactattttggttcatgatgttatactttgactattttacaataatagccaatgtaaacaaacatctttgggattctcaaattattacttatgattcttggacattgcagctcttcgatactgacgcattcctagctttttccaaggacaccgtatgttaacatccgtgccagcctcattatccccacagccaggctctgggttgggcggtaatgagcattgtgcggtttcactttacactttgcaaagttgattaaggcagtgccttctcccatgatcatttttgtaccctgatgtagtaaaatggctaaatatggtgaaagtt

SEQ ID NO: 492 - DNA, 692 bp, Homo sapiens
aacattgtggggccagcagtctctgaccgtcacgtgacagctatgcgccccatgacgcctctccagggaggcagagtgggtggcactgaggtggagctcaccttcctgaaattcagccccctcagtttggaggaaggaggtaaactgtttcctgtccagccagaagtttgcggagggccttccccaggccaggcaatgctgcctgcgactctgtccctgacagcgttggatgcaccgtatctcttctgatattaagtctggaagtgatttactatccgagtcctcccacagttcgagccttttgatgtactttgtgtgcatgtgtttctgtcacatacgtgccacagtggaacagattttgttttgacactattttggttcatgatgttatactttgactattttacaataatagccaatgtaaacaaacatctttgggattctcaaattattacttatgattcttggacattgcagctcttcgatactgacgcattcctagctttttccaaggacaccgtatgttaacatccgtgccagcctcattatccccacagccaggctctgggttgggcggtaatgagcattgtgcggtttcactttacactttgcaaagttgattaaggcagtgccttctcccatgatcatttttgtaccctgatgtagtaaaatggctaaatatggtgaaagtt

SEQ ID NO: 493 - DNA, 7340 bp, Homo sapiens
actcctcggaaccctcggaggttgcgcataaacaattttttcttccagaacggcccccctctccgccctgggggagccgggaggatgtgcagccccagtcctcctgctcggcggagcctcgcgcgcgcagagcctagcgcgattcgcgccctcattactactacaaagcgcgggccagaccaatcccctttctaatgcaccattttcgactgagaacatcaagaggccagaaacttccaagtcagcttgcagacgcagacgcctcctggggtcctggctttaagaaccagatgccaacactcccggacagtttatggcatccggatccctcaagggtgctcatctgcagttgagagtgttagtagcaattatttatctgtcctggagaggagttcctgaacataaatgtcctctgctggccctaaagctgggggcggaggctgtgtgttgtggggtgggggttggggggccgaatgttcccggtcctgttatctggtttagcagcatttgttgtggttttcgaggaaacggcatttggattacataaggattcaagtttttgctgtacttgtttatttaataccttggcaagagggagcccttaccctgaaaccagataaccgattttgggtttaaaacagccttagatgaagggccactcgaggggaagaaaatgagcaaagccacaaaaagcaaacaagggaatgtttatttttctctttttggatatttttgaagacctgcctaacctcttacacttcttgtcgcatacagctaataaatggcattaacaaagcgtttcagcgactaccacggcttcacagtggctcctcccctgccctgccaccattcaggctgtaattccttccaggattcccgcaccatcctgtgtgcccagagctctctagagcaccaggtagaactccgtgctaaatccaattgcttgcaatcttctgatccccttttagggagatcacttttcagcttggttcaaagaaagcaaagtttgggaagtttggcggaggggccgacttaactacgggcactgcaaatattttgttacaaatgctgtgaagtgccccgatttgtggctgcgttagctttcacaaaggattttcctgtgtcttttgttccgatcaccaaattaaaagagaaaattaacttgagtgagagataaggtcttggaaaacaatcttgggccgcccgcgagctggcgggagcggggctggcgtcgccttgtctgcgccgccccgaggcgcgagtcttggggtccggccaccgcagggagcctaggtcatgcagggacccccccctccatccgctgtgcaccctcgcgccacagcgcagcacccaggccaccccccctctgcccaccagcgtccgtgggaatccgccccagccagcgacaaggacggacttgtccggaatcaaactgcatcttaatattataatgcggcaccaaaagcaaaacccgaggccccggcttgcagtccctaacaagaaacacattgtgtgcactttttcttttttggctcaagccacgttcgcgcgccggcccctccgcagcgagccaagtccatgacttcagtgaggaggaacccgcctgcctcgcaccacgtgcgctcccagctggggcagccgccctgtgagccctgtcccggtccctgggacgggctagggcctggccgggacgcgcttgtcctgggcacaggacaagggctttggggcacagccctttctcggccggggaggcaggcgaaccgatcgcccgggcactggtgttacccaggcggcgccagcgcgagttggctggtggacaggtttttcaatagtttgaactccttcttccccttgccgcatctttaaggcgtttactcccagattcagccctctcctcataataatgacagtttgcagacttttcctttccagttagagtgcgtgcgcggatcctgcaagatcccagccgcgcgtcaccgcgaaccattctgcgggaggggcaggacctaaggctgcatctccaggagggaacgtggagacaccgcgggcgagggggacctggaggagttcctggaggagcagtcctaggcacggggcgaaggatttgcgctctagctaggtggagcgcacatcgccctggttagctctgcgtgggtcctgggctcatcccggcctcttcctgcctccgctgacatcagggcctctcctgtttagtcctaggcctgcccttcatcaggactccgcagaaaaggatgggtaaattaaggcatacatttaattttaaccatcatgcctgactttctaggattctgtgtgaagaatacagagacagacgttccatttcaaagaaaaaagagcaacacgaaggccctctttaaggagagagtaaacattcactttaggtaaaaaatagtcttttacacgcctgtgcacggcacacctcttttgctgttcaccttgagcccaagagtttggaaaggctgcccccatttcagagaggaagaaacgcaggcacacgtgaatgacagactcctctgtggtggcctagactccagccaacacttcctaggacagcctgccattgtgcaaaggtgtgtaaccttgactccaggtggagcattgattactcttttaaccttgaaatgtattccactcctggacagctggattgccaagagccaggaatctgtgaaaacagtttgttctcatttttcttccaagttaacaccgaatgactgagcttgaccctttgttaactaaaggtcaactaacatcttaggacttttcaaaccttagtctatgtaagaaacccacgtttacacccagagttctgtggccacctgtataaattctgattgagtaggtttggtgagcagcccaggatatagcattttaagcaagcatggcgaggagatgctgatgccggtggtgcggcgaccacaatttgagaagcttcagataaataattggcctcttaaatgagccctggataaataatcggcctcttaaatgaaccctgcagtaggcagactgctgggtgagaatgagcctacttggaccctttaaggcagcggtccccaaccgttttggcaccaggaaccggcttcatggaagtccatttttccaatggggggttgggagagggttgagggagtggggctgggggatgggtggtgggtactaggggtatagttttgggatgaaactgttccacttcagatcatcaggcattagattctcctaaggagcccacagactagaaccctggcatgtgcagttcaccgtagggtttgcgctcccatgagaactaacgctgtggctgatctgacaggaggcggagctcagggagtaatgctcattcactgctcacctcctgctctgcctgggattcctaacaggtcacagaccggtaccagcccactgcctggggttttggggacgcctgctttaagaaactaactgtacactcgtttctagaaattcaagagaaggaaaatctgttatacttacccgcattttctctttttcctttgttcttttttccttcctgatattccattagtctccgtttgagtaattcctgctgtttcaagagcattttttggacagtcttttagggtaggtgtgttggtgacatgttcccttagttttcccgcatctgaagtcttgttcttgccttcagttctgcaggatatttttgctggatatagaatttggggttgacagtgttttttcgttttagcacctgacattctgtggtgctttcttccttctatcagggtttctcatgacaaaatctgatttctcatatgaaatctgctgttatttgaattgctttttccccaatgtaagtaaggtgtggtttctctctccttgatttgtcttttcatttttggaagtttgcctatgatctctctaggcatggatttctttaggtttattctgtttgaggttctctagacagcttcttttgccaaacttgggaaattttcaaccattatttcttcacatgctttttcagccctgccctttttctcttctcttttcagaactccaatgacactaatgttagatcttttattataatcccagaggtccctgagactatgttaatatatttttaaaaaatctgttttctctctgttgttcagttgggcaatttctgttgttctgtcttcaggttcacagatggtttcctctgccctctccactgtgcttttgagtccattcaatgagtttttactttggttactgtatttttcagttttaagatttccctttcattcttctttacatcttctgcttctttactgagttttctattttttcatcttttttttgcctgttcataattgctcattagaagatttttctgatggcccctgcagagtccttgtcagattattccaacatctgtgtcacctcagtgttggcaactgttgattgtcttttctcgttcaagttgagcttttcctggttcttggaatgatgaatgattttttttttcttttttcttgaaacctgggcgttttgggggtaatgttatgatgtggagcttatttaaatcttctattatagtggcctctgctgcaccaccctggcttgggaggaggtgctcctcacgtggcctccaatgacattgtggggtggaggcatcttaccattggaaggtgatgaatgtcgcagttcttactcaaccttgacaacctcagtggggagagagcagtgcctgattatcccctgggtggtggatggggtgggtgggtgttcaggctcccaggtagcctctgctgatgcttattgctgacctgcagggatgactgtctgctccccactgcaccttctctgacaccatcctgttgttcagggtggcgtcttctgacagcagactgaggggggccatctagctcttcactcccctttgctgatggggttagagttggggccacagtcttttctgtggcgtttggttgaagtgggacggttatagtctaaaaggttttggtttcttggcttctctcttacagtcaccatgtaacaaatgcagacatctctgagatcaccatgcagtgaggaagtctaagctggtggcatgaagaggccacatggaaagggctaaaaaaggggccagcctcagtcatcccagctgagcacctggctgggaataaaagaggactccgtggatgtccagcccagtaagatgacctcagccccagccaccaactgaccaagcacacaagacatcgtgaggctgcctgctggagcctggccagtgggactgtagagtaactcattgtcgtaagtcaatacttttgtgggtgatttgtttcataaagtggcctccaaaagagaaattgggggtacagagtttctaggtataatcttgtgcattcattatagttgtaatcattgataatttatttgtgtatttttcctgaaagttttataacaacatgatttatagtgcataaaataaacatatccctacacccaacaaacctacctgttttttttgttttttttttttttgagacagggtctcactctgttgcccaggctggagtacagtggcatgatcatggttcactgcagcctcaaccttttgggctcaagcaatcctcctacttcagcctcccaagtagctggggctatgggcatgtgtcacagcacccagctatttatttctttttgagacagggtttcactcctgtcacccaggctggagtgcagtggtgcgatagctcactgcaacctctacctcctgggctcaagcaattctgctgccttagtcccccgagtagctgggactataggcacatgccactgcacctggctaatttttgtatttttttagaggcgaggtttcgtcatggtgccttggctgttcttaaactcctgagctcaagtggtcctcctgccttggtctcccaaagtgttgggattacagatgtgagccactgcatctggctaatttttatatttttttgtagagatggattttcaccatattacccagctggtctcgaacttctgggctcaagtcatctgcctgtctcagcctcccaaagtgctgggattacaggcatcactgcaccccgcctaaaagtgccttaattttaaaagaaatacaggttttatttgatatgtgtctagtatattcttaggactttcttttaaccaataagaacccctaccaactatcccccaagatatagaatttataaccctatgtgatgactgtatgttttgaaccaaaaccaagtatgatgaatggtaccagctcaggggccctggagacacgaggaagcctcactggtgagaggtgactgcctgtgggccgcacagtttcctggaaaggcagtgagagcatctggtacctccagacactgcagaaacagtgtcacagaaacatctcagaggcgtcacttctctttatcaagattttaaagtgatttcaacattaaaaaaaaacaacaacaatgtaaagaatttgagtgtggagtgatgatcatgcttccaggttaggatcaggctttttctcccattgtcttgttgatttaaggtgcaggaactcctgggatggtgttgcccagtgacacaatcccagtgtggccatttctgatcccgagaaagcagtcaggagtgggtggatgcagttacagttcatcaagtcctgctagttcaagtcatgagtcctgaattctccaggaggagccactaaagaaatgcagaagcaggcaatccttgcaataaggtgggatgaggttctttggttgctgccgttacgggggtggggtgcatgttggggcctggggggtgaggctgagggctcccccagtctgtccctccctgagcctgagctcttggttcccacccagtcctttgtttctttcgtctctgggagcacctgcacccctggtttgcagcgtgtcctagggtgagtcaccatgagccccaggttcccatgtgtaaaggatgggcagcgctccctcacctgcttctgcactaagcccttacagagccctcagacggagactgctgctttcatatcttgcaggccagcaaactgccagtgtgaaggatgcccaggtaacctgcccatgccagaacggccaggagatggtggaaccagaatctaagcccacgcccatctgacctcaaagtctgtgctcctgaggttcgcaccgagttgcctcctaagacttgctgaaactggatcacgtccatttacccatctctgagagaaatgcaagctttaaaaaaggaaatatttactatggatattttacaatagttccaaaacatgaaagttttaaataagatattcttaaccatcctca

SEQ ID NO: 494 - DNA, 2511 bp, Homo sapiens
tattgacttcagacatgttttattataatcttatacagtctacataaatctgaacttgtatttatttgggttcagttataacatagcataataataatcaaagctctggtcctctgaaataaagcaggcaatcaccattcaataaacacacttgatttattttgtataaaagggttaagtttacaactaaacttttataaaaagtttagcatgaataagtacatcattacacttttgaatgcagaaatagacatctctgccactatacaagaaaactctaattaaagagttcacaaggtttcactcaaatagatatatttatatataaatatatacacagcattcagtaggcttgtgtcaaaaaggtaatttctgaccaaaagacttcatttaagtgactgaatactggatccttctggtattcacgctccacctttgaaaaaaggcaaagtctgcttagattgggcaattccttgtgattttaacgttttcgctccccatggtgggaatagtatataaagaaaaccttccaactgcagaaagggcatttaaaagtctttttcataaataacgaatatcacagtccaagtaagagaacaccctgggaagatgatcattcttagttttccttccattttttttttctttttaaaaaggtccattcaacttgtcctccttgtgaaatggttgaaaaataagttcagcacttaaaagattccgtgaatttgttgttgttgttgttgtgcaaagaataaaagaaatcatgaacacctgcgaaagagtgggggagaaaggcatgtttaagagaatgtaacctaagggcagaggcgggcgactggcgccgggaggaagccacagtttgaacatttaaccaaacactcaaagattgggcaaaccctggcgtccagatgcaacacacacactcgcctcgacagcgcaaattaaacattaaaatagcagagactcaagggaaaaacttcccaacccaatctcctatttggatctccaacagcagtgctacaggcgccagtctgcttctcgtaacaattatttgattgaaaacagccctttagttaacagatagggaagtctgggatcccacatcacagggttgaaggcacagggtagcaatcctcaactagcccagagaatcccagaggactatagttttagggaaggaggatcactatggaatttgtggcggtaagattaattacagtggaggttagtacctcatagtaccagaggactcgtaggaagatccagggcattacatttgctacaaagccaatacacacgttcctcggccgccttcgtagtaagttattggcatcatttccttttaaaggaaaatgttctgtgatctcgagcacccaaagctacaagctccttcatgtctagtgagacaatgtagtacgggtaacaccgcgaagtaagcatgcatttaccaaatcagacattttatagatacacaagcaaaaacacatgcgcgcgcgcacacacaccgaggggcagtttacccacgggtggcacaagcaaacactcaccgcttattcagccacacagtgctttgctgtcatttgacattaactcagaagggaattcagaagcctggaaagaaagaggataaagagtacgaggttaagacaatgttaagtagaaagggtttttttttttttttttttttttttgtagtccacagaccagcaagttccattaaacacgtttatggtaacaattcagatttaaagacagacgcattaacatgtcagaacttactagcaatttcacgcacagctcaatctacagcagattctgaagaaaataaagttaaatagctcatacgaaagtcaccgtctgggctacggatctcctagtgacagcccagacgaccgcgggagtgtgcggcggcggggcggggaccccggagcaggtcttacctgcaaggacaggatgctgatatccgtgttgagggtggtcagcggcgtcctggacgccatggttctgcccgggtctctggtgatgcaggctgacaatagtgggatgcgagtccagggcgatctgcaggtccaagatgtagtcgatgacgtgctgcaggatttccatcttgctcaccttcttgttctgggggatgctgggcaccagctccttgagcttggagtagcagtcgttcatgttgtatagcaggctcatcgggtcgtccacaggggttttgctccgggagatgcccaggctgtggtccgacagctgtttttcctaacggacctcacgggactgaaggctttcatgctgaccgcgagggaaggcgagaccgggagggagctggctgccctgaagctcaggccgccgctgccgcctgctgagctagctgcgcttggcaccgggctcggctcagaatgaagcccgagcccggcggggcggcttttatccgcactcgccggggccacacgctggagcttcccttcgtccccattggcggaaggtggcacgtctatcaagacgagcgggcgc

SEQ ID NO: 495 - DNA, 7340 bp, Homo sapiens
actcctcggaaccctcggaggttgcgcataaacaattttttcttccagaacggcccccctctccgccctgggggagccgggaggatgtgcagccccagtcctcctgctcggcggagcctcgcgcgcgcagagcctagcgcgattcgcgccctcattactactacaaagcgcgggccagaccaatcccctttctaatgcaccattttcgactgagaacatcaagaggccagaaacttccaagtcagcttgcagacgcagacgcctcctggggtcctggctttaagaaccagatgccaacactcccggacagtttatggcatccggatccctcaagggtgctcatctgcagttgagagtgttagtagcaattatttatctgtcctggagaggagttcctgaacataaatgtcctctgctggccctaaagctgggggcggaggctgtgtgttgtggggtgggggttggggggccgaatgttcccggtcctgttatctggtttagcagcatttgttgtggttttcgaggaaacggcatttggattacataaggattcaagtttttgctgtacttgtttatttaataccttggcaagagggagcccttaccctgaaaccagataaccgattttgggtttaaaacagccttagatgaagggccactcgaggggaagaaaatgagcaaagccacaaaaagcaaacaagggaatgtttatttttctctttttggatatttttgaagacctgcctaacctcttacacttcttgtcgcatacagctaataaatggcattaacaaagcgtttcagcgactaccacggcttcacagtggctcctcccctgccctgccaccattcaggctgtaattccttccaggattcccgcaccatcctgtgtgcccagagctctctagagcaccaggtagaactccgtgctaaatccaattgcttgcaatcttctgatccccttttagggagatcacttttcagcttggttcaaagaaagcaaagtttgggaagtttggcggaggggccgacttaactacgggcactgcaaatattttgttacaaatgctgtgaagtgccccgatttgtggctgcgttagctttcacaaaggattttcctgtgtcttttgttccgatcaccaaattaaaagagaaaattaacttgagtgagagataaggtcttggaaaacaatcttgggccgcccgcgagctggcgggagcggggctggcgtcgccttgtctgcgccgccccgaggcgcgagtcttggggtccggccaccgcagggagcctaggtcatgcagggacccccccctccatccgctgtgcaccctcgcgccacagcgcagcacccaggccaccccccctctgcccaccagcgtccgtgggaatccgccccagccagcgacaaggacggacttgtccggaatcaaactgcatcttaatattataatgcggcaccaaaagcaaaacccgaggccccggcttgcagtccctaacaagaaacacattgtgtgcactttttcttttttggctcaagccacgttcgcgcgccggcccctccgcagcgagccaagtccatgacttcagtgaggaggaacccgcctgcctcgcaccacgtgcgctcccagctggggcagccgccctgtgagccctgtcccggtccctgggacgggctagggcctggccgggacgcgcttgtcctgggcacaggacaagggctttggggcacagccctttctcggccggggaggcaggcgaaccgatcgcccgggcactggtgttacccaggcggcgccagcgcgagttggctggtggacaggtttttcaatagtttgaactccttcttccccttgccgcatctttaaggcgtttactcccagattcagccctctcctcataataatgacagtttgcagacttttcctttccagttagagtgcgtgcgcgggtcctgcaagatcccagccgcgcgtcaccgcgaaccattctgcgggaggggcaggacctaaggctgcatctccaggagggaacgtggagacaccgcgggcggaggggacctggaggagttcctggaggagcagtcctaggcacggggcgaaggatttgcgctctagctggtggagcgcacatcgccctggttagctctgcggtgggtcctgggctcatcccggcctcttcctgcctccgctgacatcagggcctctcctgtttagtcctaggcctgcccttcatcaggactccgcagaaaaggatgggtaaattaaggcatacatttaattttaaccatcatgcctgactttctaggattctgtgtgaagaatacagagacagacgttccatttcaaagaaaaaagagcaacacgaaggccctctttaaggagagagtaaacattcactttaggtaaaaaatagtcttttacacgcctgtgcacggcacacctcttttgctgttcaccttgagcccaagagtttggaaaggctgcccccatttcagagaggaagaaacgcaggcacacgtgaatgacagactcctctgtggtggcctagactccagccaacacttcctaggacagcctgccattgtgcaaaggtgtgtaaccttgactccaggtggagcattgattactcttttaaccttgaaatgtattccactcctggacagctggattgccaagagccaggaatctgtgaaaacagtttgttctcatttttcttccaagttaacaccgaatgactgagcttgaccctttgttaactaaaggtcaactaacatcttaggacttttcaaaccttagtctatgtaagaaacccacgtttacacccagagttctgtggccacctgtataaattctgattgagtaggtttggtgagcagcccaggatatagcattttaagcaagcatggcgaggagatgctgatgccggtggtgcggcgaccacaatttgagaagcttcagataaataattggcctcttaaatgagccctggataaataatcggcctcttaaatgaaccctgcagtaggcagactgctgggtgagaatgagcctacttggaccctttaaggcagcggtccccaaccgttttggcaccaggaaccggcttcatggaagtccatttttccaatggggggttgggagagggttgagggagtggggctgggggatgggtggtgggtactaggggtatagttttgggatgaaactgttccacttcagatcatcaggcattagattctcctaaggagcccacagactagaaccctggcatgtgcagttcaccgtagggtttgcgctcccatgagaactaacgctgtggctgatctgacaggaggcggagctcagggagtaatgctcattcactgctcacctcctgctctgcctgggattcctaacaggtcacagaccggtaccagcccactgcctggggttttggggacgcctgctttaagaaactaactgtacactcgtttctagaaattcaagagaaggaaaatctgttatacttacccgcattttctctttttcctttgttcttttttccttcctgatattccattagtctccgtttgagtaattcctgctgtttcaagagcattttttggacagtcttttagggtaggtgtgttggtgacatgttcccttagttttcccgcatctgaagtcttgttcttgccttcagttctgcaggatatttttgctggatatagaatttggggttgacagtgttttttcgttttagcacctgacattctgtggtgctttcttccttctatcagggtttctcatgacaaaatctgatttctcatatgaaatctgctgttatttgaattgctttttccccaatgtaagtaaggtgtggtttctctctccttgatttgtcttttcatttttggaagtttgcctatgatctctctaggcatggatttctttaggtttattctgtttgaggttctctagacagcttcttttgccaaacttgggaaattttcaaccattatttcttcacatgctttttcagccctgccctttttctcttctcttttcagaactccaatgacactaatgttagatcttttattataatcccagaggtccctgagactatgttaatatatttttaaaaaatctgttttctctctgttgttcagttgggcaatttctgttgttctgtcttcaggttcacagatggtttcctctgccctctccactgtgcttttgagtccattcaatgagtttttactttggttactgtatttttcagttttaagatttccctttcattcttctttacatcttctgcttctttactgagttttctattttttcatcttttttttgcctgttcataattgctcattagaagatttttctgatggcccctgcagagtccttgtcagattattccaacatctgtgtcacctcagtgttggcaactgttgattgtcttttctcgttcaagttgagcttttcctggttcttggaatgatgaatgattttttttttcttttttcttgaaacctgggcgttttgggggtaatgttatgatgtggagcttatttaaatcttctattatagtggcctctgctgcaccaccctggcttgggaggaggtgctcctcacgtggcctccaatgacattgtggggtggaggcatcttaccattggaaggtgatgaatgtcgcagttcttactcaaccttgacaacctcagtggggagagagcagtgcctgattatcccctgggtggtggatggggtgggtgggtgttcaggctcccaggtagcctctgctgatgcttattgctgacctgcagggatgactgtctgctccccactgcaccttctctgacaccatcctgttgttcagggtggcgtcttctgacagcagactgaggggggccatctagctcttcactcccctttgctgatggggttagagttggggccacagtcttttctgtggcgtttggttgaagtgggacggttatagtctaaaaggttttggtttcttggcttctctcttacagtcaccatgtaacaaatgcagacatctctgagatcaccatgcagtgaggaagtctaagctggtggcatgaagaggccacatggaaagggctaaaaaaggggccagcctcagtcatcccagctgagcacctggctgggaataaaagaggactccgtggatgtccagcccagtaagatgacctcagccccagccaccaactgaccaagcacacaagacatcgtgaggctgcctgctggagcctggccagtgggactgtagagtaactcattgtcgtaagtcaatacttttgtgggtgatttgtttcataaagtggcctccaaaagagaaattgggggtacagagtttctaggtataatcttgtgcattcattatagttgtaatcattgataatttatttgtgtatttttcctgaaagttttataacaacatgatttatagtgcataaaataaacatatccctacacccaacaaacctacctgttttttttgttttttttttttttgagacagggtctcactctgttgcccaggctggagtacagtggcatgatcatggttcactgcagcctcaaccttttgggctcaagcaatcctcctacttcagcctcccaagtagctggggctatgggcatgtgtcacagcacccagctatttatttctttttgagacagggtttcactcctgtcacccaggctggagtgcagtggtgcgatagctcactgcaacctctacctcctgggctcaagcaattctgctgccttagtcccccgagtagctgggactataggcacatgccactgcacctggctaatttttgtatttttttagaggcgaggtttcgtcatggtgccttggctgttcttaaactcctgagctcaagtggtcctcctgccttggtctcccaaagtgttgggattacagatgtgagccactgcatctggctaatttttatatttttttgtagagatggattttcaccatattacccagctggtctcgaacttctgggctcaagtcatctgcctgtctcagcctcccaaagtgctgggattacaggcatcactgcaccccgcctaaaagtgccttaattttaaaagaaatacaggttttatttgatatgtgtctagtatattcttaggactttcttttaaccaataagaacccctaccaactatcccccaagatatagaatttataaccctatgtgatgactgtatgttttgaaccaaaaccaagtatgatgaatggtaccagctcaggggccctggagacacgaggaagcctcactggtgagaggtgactgcctgtgggccgcacagtttcctggaaaggcagtgagagcatctggtacctccagacactgcagaaacagtgtcacagaaacatctcagaggcgtcacttctctttatcaagattttaaagtgatttcaacattaaaaaaaaacaacaacaatgtaaagaatttgagtgtggagtgatgatcatgcttccaggttaggatcaggctttttctcccattgtcttgttgatttaaggtgcaggaactcctgggatggtgttgcccagtgacacaatcccagtgtggccatttctgatcccgagaaagcagtcaggagtgggtggatgcagttacagttcatcaagtcctgctagttcaagtcatgagtcctgaattctccaggaggagccactaaagaaatgcagaagcaggcaatccttgcaataaggtgggatgaggttctttggttgctgccgttacgggggtggggtgcatgttggggcctggggggtgaggctgagggctcccccagtctgtccctccctgagcctgagctcttggttcccacccagtcctttgtttctttcgtctctgggagcacctgcacccctggtttgcagcgtgtcctagggtgagtcaccatgagccccaggttcccatgtgtaaaggatgggcagcgctccctcacctgcttctgcactaagcccttacagagccctcagacggagactgctgctttcatatcttgcaggccagcaaactgccagtgtgaaggatgcccaggtaacctgcccatgccagaacggccaggagatggtggaaccagaatctaagcccacgcccatctgacctcaaagtctgtgctcctgaggttcgcaccgagttgcctcctaagacttgctgaaactggatcacgtccatttacccatctctgagagaaatgcaagctttaaaaaaggaaatatttactatggatattttacaatagttccaaaacatgaaagttttaaataagatattcttaaccatcctca

SEQ ID NO: 496 - DNA, 318 bp, Homo sapiens
tacaaattaagatgtgcccatggcttagcctgcgctccatcctgggccctgcagcccactcccagggtaaccctctgcagacccaagactaatgggacaagggatctgctggggcagtgtaggccaaagctgcggctgggtccaccagaggccaagatggagactgacctggacatgcttcctgggcagctttggtggcagtctcccttctctatgcctcacttttctggcagaattttcaggcatttccaagcggaagggagggagagaactcaggcatcactttgaatgttctgccagtgaccagctttaaacaaa

SEQ ID NO: 497 - DNA, 318 bp, Homo sapiens; identical to SEQ ID NO: 496

SEQ ID NO: 498 - DNA, 520 bp, Homo sapiens
ccttgttccccaaaaagctggagccctttaagtggtcagctccatggcactttgcctttgaaaggacagttctcagtggcatcccaggctaatgcatcctggccttcttttcggtgaatcagtaggcaatttgactgattataggataatgttcatgaaatgcaaccaggctttgtattcatgttggcttcactgccagagttcattgctgaccatccagggaacggggaaggggacagagatggttccagtgcaaacacatctccacaactgggaaaacagctcaaacttagagggtgtttcctctgatgggggagaggaaaccaggggctttctgagaaggcaaataatctgtaatattgatgtgcctctttctcttctctctgccaccattttcttctaagggttttcaccgaagatgccagtcagcatgaatgggtatacttcatggtttcttttatttatttctatttactattaaaaatgaaatacaacttgcatgcagtaaaatgcacacgtc

SEQ ID NO: 499 - DNA, 3881 bp, Homo sapiens
gagatgaagtggagaagtacaaccgaaatggagtcaatgctctgcagctggatccagcactaaatagacttttcacagccggtcgagactctatcataagaatatggagtgtcaatcagcacaaggtaatgcagggattaaaatctgtacccagcaaattctggacaaatggcttttactgtctaatatgacacttttcacagtttcagatttaatctctctgaatgctgagttatttggtacactctataaagacatcgcaaccagaattctgtaagcctctgagaaaaaccatccctaggaaagtttcagaagtgtttcagctaagacaaggactccctaaactaggtttgccttacagagttctttgccacaaaggaacaaagtgatttggctagtagggggattactttcaacaattaatttttttgctttaaatatgttccccaacaacctcttggtaaccttactaaaaaaagattgaatattcttttacatttctaattaatcttgaaaaaatattttattttcctcacttaaaagtaattaggatcctcacaaaccccacacggcctaactaggtaatacaaggttaggctgagcatggtggcccacacctgcaatcccaacaatttcggaggccaaagtgaaaggattccttgagtccaggagttcgagaccagcctgggcaatgtgacaataccctgtctctgcaaaaaaaaaaacttaaaaattagctgggcatggtggcacacacctgtagtcccagctactcggggagctgaggtgggaggatcacttgattgagtatgggaggttgaggctgagtgagccgtgatcacaccactgcattccagcttgggcaacagagggagaccttgtctcaaataaataaataaagataatataaaattggtgttaaaactatgaagacaacatgctccccttcaaagatttccctttcttaagcagggaacagggtttaaatatgtgtaaagataaatccccaggcaaatggtaacgagcccttttagtattttgttggaacacctatattgtgaatgacagagaaaagaagaatcagggaagaaaaaaagagcatttattgatcttctaattatgtgccatacgctctttgcattttcatatccaatgtgattttaattttcagtgtccctcaaggtacctattaggatccattttcttttttttctttttttttttttgagatggagtctcgctctgtcacccaggctggagtgcagtggcgcgatcttggctcactgcaacctcttgactcctggcttcaatcaattttcctgcctcagcctcctcagcagctgggactacaggcacacgccaccacatccagctaatttttataattttagtagagacggggtttcaccatgtgggtcaggctggtctcaaacttctagactcagataatccaactgccttggcctcccaaagtgctggtattacaggcgtgagccaccgcgcctggccagatccattttcatagatgagaaaatgggctcagagaaacccatggttatgtggctaggaagtgacagagaattagtacccagcccaacttgaaaaccctagtgctagaccttgtatttttaaaagtttgtgtctttttagcaagttttacaagtctgatattcagttcagaaaaagaaccactactttatgcgcctataacttcagtctggcaggctttgaattctttagccaatggaccatgcagtggtggccaaatgtcaaaagcatgaaaagtaagaaaactatgtttggctttgaaatgctttttggtacttataattgaattggaatgtctcctttctgagcattcacagtatttcaaacaaattaagaaaaacacccaaaagaactaacctgaagaatctggaaatctgcctgtcttgccccaaacatcttttttctggtcttccttttatgacaagattgaatagcattatttgtcaaacagacttgtacagagctgttctgtttgcccataaagtgtctcaaacttgcctgttttaggtgtaggatgtaactaaatactgttctttaaaaggcctctcctggttattaagccaggtaagagaagtagaatctcgaatcacctaattgaaatggtgacacaggttgtcctttctcagccgttgggtttcctttcatctctgaaggcctgtaggtaccatgaggaaaacatttaattcagagggtgaacccaacagtaggaagctgaaagcagaagtgtttatctccctctgcattcagaccaggctccttagtgcactcatcagactcattgctgcccctgctgtctgctgttgagccttcaccaccactcattcaaatccccacagcctacagattcctacaagtcatgtcctttctagtgaaccctttttaaagggttttatgtcacacacagtgcctagtccagagcttgttgccttcactttaacaaggcaaaaaaaaaaaaaatgaagtatttgtcctggaaacctaagctttcagtaagagtaaaactgtcctgaaacaaaactgtttacatctgttatctggaagcatcacctatttggtgagattctactcagaattcaggtgttagttttaatgcctagagcagtatgtcacattaattgaagaatttaaccatatctatcatttgtaatatatttcattctctcatataaactcttaggatttttcttttaatttcagcaagatccatatatagcatctatggaacaccatactgattgggtaaacgacattgtactctgttgtaatgggaaaacatgtaagtatttctttggattattattgggcttctgatatattttttgttttttatataagcttttttattgaaacatacatacagaaaagtacacacacttcgagattgcagttcaacacaattttagaaagtgaatacccaaatcaagaaacaatattactagaagccctcttgtgccaccctttgccaccctttcagttattccctcttgccccaaggtaactgctcttctgtcttctgaacaccaaagggtagttttgccttcatttgaactgtatatagactcgtactatatgtattcttcttttagccttattaatacctctttttgttctaattttggtgagatccattccttggttttgcagtccgagttacaggaatttttctcaatcacattagttgagccttcaactggaacattaaaaatgtttgcactgcttgttttaaaaatatatttttttctttgaacatgtgtcttgagattttaaaaaattgaggcaatatacaataggttctagaaagagcttttaggtatgtttgtgtgtgtaagagagagaatatgttagtttgaaataatgttacattgttgtaagataagttttcaaagttttaagtcatactactaaggagtttgttaattctttgcttcttctagtaatatctgcttcttctgacacgacagtaaaagtatggaatgcacacaagggattttgcatgtcaacattaaggacacataaggtaaaacaatacagttctcagtgtctttagtgtaatattgggatctcagtactttgtgtggctcattttattactgatctacagaatagatcatagtatgtctgttctattacaggattacgtaaaggccttagcatatgccaaggataaagaactagtagcatcagctgggttggacagacaaatattcctttgggatgtgaatactctaacagcattgactgcctcaaataacactgtcacaagtaaggtgtttaaaagaaacttctttgaaagtgatccaagttaacataaataaagaatggtttataaaaca

SEQ ID NO: 500 - DNA, 169 bp, Homo sapiens
gattgaacaacaaagagctagttcctcactgcagtctaaaaatggtaacttctccaggtataacctggttattttttgtacgtgtgcatgtcttagctccctagctaaaatgtaagtccctgcagggtagaggagactgtcttactacttcgtatctcccacagcattc

SEQ ID NO: 501 - DNA, 881 bp, Homo sapiens
gcttcatccatgtccctgcaaaggacatgaactcatccttttttatggctgcatagtattccatggtgtatatgtgccacattttcttaattcagtctatcattgatggacatttgggttggttccaagtctttgctattgtgaatagtgctgcaataaacatacgtgggcatgtttctttatagtagaatgatttataatcctttgggtatatactcagtaatgggatggccgggtcaaatggtatttctagttgtagattcttgaggaatcgccacactgtcttccacagtggttgaactactttacactcccaccaacagtgtaaaagcattcctatttctccacatcctctccagcatctgttgtttcctgactttttaatgactgccactctaactggcatgagatggtatctcattgtggttttgatttgcatttctctgatggccagtgatgatgagcattttttcttgtgtctgctgcagaaatgtcttcttttgagaagtgtctgttcatatcctttgcccactttttgatggggttgtttttgttgttgttgttgttgtacatttgtttaagttctttgtagattctgtatattagccctttgtcagatgggtagattgcaaaaattttctcccattctgtaggttgcctgttcactctgatgatagtttcttttgctgtgcataagctctttagtttaattagatctcatttgtcaattttggcttttgttgccattgcttttggtgttttagtcatgaagtctttgcccatgcctgtgtcctgaattgtattgcctaggttttcttctagggtttttatggttttaagtcttaacatttaagtctttagtccatcttgagttaattttt

SEQ ID NO: 502 - DNA, 421 bp, Homo sapiens
aagaattgagtggagacctgctatgatacgcagtagaaaaatgagaaaactttagcaggaggagatagagagatagacgcacaatagaggtagaaggctacatagaaggtaaagtgaagattgttttggctttggaagacagaaaagttggactataacatgaataaagagaatttggaaactgacccataacattatttgggaaaactaacctggagtttaatattaatgtaacattaattgttgttaaatatcttagttgctgcctttcttaaaataaatttgatttttcagtataccagcacccttctatacaaatacataagaaaatcagatttttaataattatacattccttagataagcttaattagagctcagcttctcatcttggagaaacaagttctctgaagattgaaga

SEQ ID NO: 503 - DNA, 421 bp, Homo sapiens; identical to SEQ ID NO: 502

SEQ ID NO: 504 - DNA, 421 bp, Homo sapiens
aagaattgagtggagacctgctatgatacgcagtagaaaaatgagaaaactttagcaggaggagatagagagatagacgcacaatagaggtagaaggctacatagaaggtaaagtgaagattgttttggctttggaagacagaaaagttggactataacatgaataaagagaatttggaaactgacccataacattatttgggaaaactaacctggagcttaatattaatgtaacattaattgttgttaaatatcttagttgctgcctttcttaaaataaatttgatttttcagtataccagcacccttctatacaaatacataagaaaatcagatttttaataattatacattccttagataagcttaattagagctcagcttctcatcttggagaaacaagttctctgaagattgaaga

SEQ ID NO: 505 - DNA, 187 bp, Homo sapiens
gcgacagggcgtcgttaggggagcgagtcgtgaccggttgggccacactcaacgtgggacgaagcttcgcctactgtttgactacgtgcgtgcagcctcccctcgatgtcggccctcgaaaagagcatgcacctcggccgccttccctctcgcccacctctacccggcagcgggggcagtcagagcg

SEQ ID NO: 506 - DNA, 187 bp, Homo sapiens; identical to SEQ ID NO: 505

SEQ ID NO: 507 - DNA, 200 bp, Homo sapiens
ccaacatagaaaaacaccgtctctcctaaaaatacaaaattagctggcgtggtggcacatgcctgtaatcccagctactcaggaggctgaggcaggagaatcacttgaacctgggaggcggaggttgtggtgagccgagatcgcgccattgcactccagccagggcaacaagagcgaaactccatctcaaaaaaaaaaaa

SEQ ID NO: 508 - DNA, 200 bp, Homo sapiens; identical to SEQ ID NO: 507

SEQ ID NO: 509 - DNA, 279 bp, Homo sapiens
gcccacaaggaactgaattcctctccccctcccaaaatgcaagccttcttttcctgaattacagaatttttgtttcttccattatcctaatattacccaaacttcttttctatcagtatctctatattaataggtgtctttattttttattttatttttattttttctttttagagacaggcagggtctcactttgtcacccaggttggaatgcagttatgcaatcatagttcactgtaaccttgaacttctgggctcaagccatcctcccatctcagc

SEQ ID NO: 510 - DNA, 279 bp, Homo sapiens; identical to SEQ ID NO: 509

SEQ ID NO: 511 - DNA, 1531 bp, Homo sapiens
aaaaaaaatccatttggttttggttttgtcctattcctccaaatgcagcagggcctttagttgtctgttaaagctgcactataatttggtatctacattttatcacacaaaggaacctccccttttgacaacaactgggctaggcagctgttaatcacaacatttgtgcatcacttgtgccaagtgagaaaatgttctaaaatcacaagagagaacagtgccagaatgaaactgaccctaagtcccaggtgcccttgggcaggcagaaggagacactcccagcatggaggagggtttatcttttcatcctaggtcaggtctacaatgggggaaggttttattatagaactcccaacagcccacctcactcctgccacccacccgatggccctgcctcccccatcccatccccaacatccctgtaccaccttctctcacatcttctaaagctttgtacaaatcacaatggtgcacttccaacaaaatatatcaataggtgttttcctctcttattttgtaaatagtattattttagctattaagctggataccttctttcaaattcagccattcagttgtaaagttgggaagaagtttcttgacaagactctgcaattaaatgcttaaaatttggaggggatccttccttgattacatgaagtatgttggtacatgggtttatacaagttcctcttgagaaggcaaaaagaccaccatgtgtgagagctctttgacttggccaataggggcctatcttaatgcacttgtttggacacatttctgatcttatttgtaaaggctgcaaaaggagaggatgaaatgctgtaaaagtaggaaatgaagtggaagctggaagaaaatgtaattggtggtacagctatgggccagatggtggaggggagggtggggacccctgccggcaagcagagtgtcacagctggctttcctcacttgggaaaagggtactgccggtctagcagcctcctctgtactcagccaggacacccagcgcgtgggacctgtttgtgtctgttttgcttccttgggaacggcacagtcactcaccctgccatttgcggaaatgacctggtgcactttgactgttaagcaatgcgttattgctgtagtcaaggttagtgcaagcaaggaaacattcccagtaaggtatttgtttccattttctgtctgtgcttctgtcagaaacttgctaggacatttagtggccaataaaaaagaaattcctaatttcaaccttatccaaggattgtgagtttttacttatttgtttgtctcaccagttgagaaactccagtactggtcacctatcctgataaatctgcctttcagaaaacctgcaagggctgtttttcactattatggcaagagacatgtattaaatggaacagaaaaggtaagttactcaaaactgcctttgggagtcagcagaaactgaaatggcatctagacctccactgtaactgtcttcatttcaaaataataggaaggtggctttgagctgagattctaaaac

SEQ ID NO: 512 - DNA, 270 bp, Homo sapiens
accgcgcgggggagctgctgccctcgctgcagaggtatggccgcctgtagccctaccccttgcttcagccccttggccctgtgtccctctgtccaccccacctccctcccctcagccagctcttttcccacctccctgccccaacaactggcccttgcatacacccttgccaccttcagcttctcctacctctccctgtccgggactgcccagaccatccctcttccaggtgctggttagagttccctcaaagctgcctgtcttgggctg

SEQ ID NO: 513 - DNA, 270 bp, Homo sapiens
accgagcgggggagctgctgccctcgctgcagaggtatggccgcctgtagccctaccccttgcttcagccccttggccctgtgtccctctgtccaccccacctccctcccctcagccagctcttctcccacctccctgccccaacaactggcccttgcatacacccttgccaccttcagcttctcctacctctccctgtccgggactgcccagaccatccctcttccaggtgctggttagagttccctcaaagctgcctgtcttgggctg

SEQ ID NO: 514 - DNA, 269 bp, Homo sapiens
accgagcgggggagctgctgccctcgctgcagaggtatggccgcctgtagccctaccccttgcttcagccccttggccctgtgtccctctgtccaccccacctccctcccctcagccagctcttctcccactccctgcccaacaactggcccttgcatacacccttgccaccttcagcttctcctacctctccctgtccgggactgcccagaccatccctcttccaggtgctggttagagtatccctcaaagctgcctgtcttgggctg

SEQ ID NO: 515 - DNA, 523 bp, Homo sapiens
ctctcccaataaatacaagctcaacagtaaagaagagccaagatcacaagtatttaaatccaaaacaagaaactgtgtgtagaaacaatgtcgggggaagttaagtgatatttgagaaaacagtgattgagtgttgttaggaggaggggtaatgaattagtatttctggcagactctttgcaagcactttaagaactaatccaggctatgagacaggcttctatctttgaagcaacgcttaaagactatgcccttatttttaaaagtatggtagcttgactatttgacataagccaaaaacgtgtctaggtggctcttccctcaggggattaatatatagctgaaagtttagttccctttccaaatacattatagctgagtgcagttgtcactatgacgtgttctgaacttctggaagcacaggcatttactgagcaataccacaaagaattctggaagaagttataaatccctttccatcacctcggaaaacagcatctatttcttaaaagctatcagttca

SEQ ID NO: 516 - DNA, 1462 bp, Homo sapiens
tcccagcactttgggaggccgaggcgggcagatcacgaggtcagaagattaagaccatcctggctaagccgccccgtccgggaggtgaggggcgcctctgcccggccgcccctactgggaagtgaggagaccctgtgcccggccagccgccccgtccaggaaggaggtgggggggtcagccccccgcccggccagccgccccgtccgggagggaggtggggggggtcagccccccgcctggccagccgccccgtccgggaggtgaggggcgctctgcccggccgcccctactgggaagtgaggagccctctgcccggccagccgccccgtccaggaaggaggtgggggggtcagccccccgcccggccagccgccccgtccgggaggtgaggggcgcctctgcccggccgctcctgctgggaagtgaggagcccctctgcccggccagccgcctccatccgggagggaggtggggggtcacgccccccgcccggccaggccgccccatctgggaggtgaggggtgcctctgcccggccgcccctcactgggaagtgaggagccccttctgctccggccagccgccccgtctgggagggaggtggggggggggtcagccccccgcccgggaggtgagcggcgcctctgcccggccgctcctactgggaagtgaggagcccctctgcccggccaccaccccatctgggaggtgtatctcaacagctcattgagaacgggccatgatgacaacggcggttttgtggaatagaaaggggggaaaggtggggaaaagattgagaaatcggatggttgccgtgtactgtgtagaaagaggtggacatgggagacttttgcattttgttctgtactaacgaaaaattcttctgccttgggatcctgttgatctgtgaccttacccccaaccctgtgctctctgaaacatgtgctgtgtccactcagggttgaatggattaagggtggtgcaagatgtgctttgttaaacagatgcttgaaggcagcgtgctcgttaagagtcatcaccactccctaatctcaagtacccatggacacaaacactgcggaaggccacagggtcctctgcctaggaaaaccagagacctttgttcacttgtttatctgctgaccttccctccactattgtcctgtgaccctgccaaatccccctctgcgagaaacacccaagaatgatcaacaacaacaaaaaaaaaaagaccatcctggctaacatggtgaaaccctatctctactaaaaatacaaaaaattagctgggcgtggtggtggacgcctgtagccccagctactcgggaggctgaggcaggagaatggcgtgaacccaggaggcagagcttgcagtgagccgagatcgcgccactgcactccagcctaggctacagagcgaaactccgtctccaaaaataaataaataaataaacaaataaat

SEQ ID NO: 517 - DNA, 32204 bp, Homo sapiens
ggattacaggcatgaaccactgcgccgggcctttttttttttttttttttttagatgtagtttcgctcttgttgcccaggctggagtgcaacggtgcgatctcagatcactgcaccctccacctcctgggttcaagtgatttttctgcatcacactcccgagtagctgggattacaggcatgggccaccatgcccagctaattttgtatttttagtagacacggggtttcgccatgttggtcaggctgatcttgaattcctgacctcaggtgatccacccgccttggccttccatagtgctgggatcacaggcgtgagccaccatgcccggcccatattttctaaattttctacagtaaacctttgtacctaataagaggcactttgctaggtactgagagtgcagtgttgagcacatattaattatcttgtttcttcaatagtgcattcgtttttgtattttattatttctgtcctacttcatttatggttttattcttttccttccttccttccttcctccctccctccctctttctgtctgtctgtctgtctttctttctttctttttactgttattttatggtttttttttgagacggagtttcgctcttattgcccaggctggagtacaatggtgcaatctcggctcacctcaaccttcgcctcccgggtttaagcgattctcctgcctcagcgtcccaagtagctgggatcacaggcacacgccaccacgcctggctaattttgtatttttagtacagacagggtttccccatgttggtcaggctggtctcgaactcccgacctcaggtgatcgcccacctcagcctcccaaagtgctgggattacaggtgtgagccatcgcacccagcctatttatttattatttatttttattttttgagacagagtcttgctctgtcacccaggctggagtgcagtggagcgatctcggctcaccacaacctccacctcctgggttcaagcaattctcctgtctcagtctcctgagtagctgggactataggggcccgccacttcgcccggctaatttttgtatttttagtagagactgggtttcgccatgtttggccaggccagtctcgaacttctggcctcaagtgatccacccggcttggcctcccaaagtgctgggattacaggcgggagtcaccgcacccagcctgttcttctttaaatctctttaacttgaaaggttagctttgttttcattttcaatctttaaaaaaaaaatactttaatactattaattttccttgaagtgtttctttagctacacatgataagttttgatatgtagttctcctattgtcatttaattataagtaatttatagactccattgtgagttcccctttaatctttgagggtataatttacagttacaaacatgtgtcgatcttcattatttgtagttctatatttatgaatgcacctactcactaaaattcatttgtaactccaaagtcagtgctcgaagtgcttttgtagtcattcgtggacactcgcagaggggtgaaacatgagtcactggatgcacatatgcatgttcccagctgtttcagctctcctactgtaaaaaaatacctttttgtgtatatttaatgccccatttttctcatttttgtggtttttgttgattttgctgtttaaaatagcctctaaggatgatgctgagtgctgtcttgcattcctaagcacaagaggctgtaatgtgccttatgtgggtttgatcacaagcatgagttacagtgccattggccatgagttcagtgctaatgaatcaacaacatgtatttcatatggagtttttaaacagaaatatacacaaaacaaggttatatattgactgattgatgaaaatattgtggccaaaggcttggaggaacccaaccctgtatttccactagaaacaatggttcagtattcactaattcagtgttttcagtgactttgtagaactaccacaaatgagaatggcatggctgtgtgtgtatatgtggtctttttttttttttctgagacagagtttcactcttggtgcccatgctggagtgcaatggtgcgatcttggctcactgcaacctccacctcccaggttcaaacgattctcctgcctcagcctcccaggtagctgggattacaggcaggtgccaccacgcctggctaattttgtattttttagtagagacgaagtttcaccatgttggtcaggctggtctcgaactcctgacctcaggtgatcctcccacctcaacctcccaaagtggtgagattacgggtgtgggccactgtgccctgccgtgtatggggcctttttattgttaatttataatttaattactttgtggtcagtgaatggttttcgtaacactgatctttttttttttttttttttttgagacagagtctcgctctgttgcccaggctggagtgtagtggtaagatctcagctcactgaaacctctgcctcctgggttcaagtgattctcctgcctcagcctcctgcgtagctgggattacagacaggccggcaccaccaagcctggctaattgttttgtattttcagtagagatggggtttcactatgttggccaggctggtcttgaactcctgacctggtgatctgcacaactcagcctcccaaagtgataggattacaaacatgagacaccgtgccctgcccaaagctgatatatttgttagcagattatttctcttatttatttatttatttattttgagacagagttttgctcttgttgcccaggctggagtgcgatgatgcgatcttggctcactgcaacctctgcctcctgggttcaagcgagtcccctgcctcagcctcctgagtagctggggttacaggcgtgcaccaccatgcccagctaattttggattttttttttttttagtagagatagggtttcaccatgttggtcaggctggtctcaaactcctgacctcaagtgatccacctgcctcgggctcccaaggtgctgaggttacaggcatgagccattgcgcctagccaattcgtcttattatcttataatgtctctcttttgtaatggttttccctttatcttctattttatatttatttatttatttttttgagacggagtctcgctctgtcaccaggctggagtgcagtggcgatctcggttcactgcaatctccgctaattgcaatctcctctaattgcaatctccgcctcctgggttcaagcaattctcctgcctcagcttcccgagtagctgggattacaggtatgcgccaccacgccggctaattttgtatttttagtagagacagagtttctccatgttggtcaggctggtctcgaactcccgacttcaggtgatccacccacctcagcctcccaaagtgctgggattacaggcgtgagcctccatacctggcaagtcatgtagggtctgacaatgaatataaaaggggttatttacataaaagtttgtgaagatattagcttagagaggcaagttaattatggtacttagagataaacaggcacatccttttatgtatatctagtgaagtcagttgctgtaatctattctgtttaaaaactgaactatactaggtctgaataacaagataatgtacatttcccctagaagataggaacgacaactcacacctgtgtgccattcctttttttcttcttctgatagtgattggacctccccaaacgacctaactcagaggaatttgggcatagtgtactagctttcttcccatgaaacatccctgtttgtgttgtatatttgaggtagtagcaacgtgattaagaatgtggactctaactggccaggcgcggtggctcacgcctgtaatcccagcactttgggaggccgaggtgggcagatcactaggtcaggagatcgagactatcctggctaacacagtgaaaccctgcctctactaaatatacaaaaaattagccaggcatggtggcaggtgcctgtagtcccagctactcggaaggctgaagcaggagaatggcgtgaacccaggaggcagagcttgcagtgagccaagatcgcgccactgcactccagcctgggcaacaggctcaaaaaaaaaaaaaaaaaaaaaaaagaatgtggactctagaatcaatcagttggctctgggttaaaatctcagccagctctactacctactagctgtttgagactgacgagtttcctcatctatttattttttaaaaaacagtaataacagtacttgattcacagggttgttaacattgagatgatgcatgtggactgttctgccagttttctggtatcccatggtgagtgctgtagctacggtgagcattgtgtgttataatcacaggtagtaggagatgggaaagcaggggccatgacaggaggccaatccagagaggttcgtgggttacaggaagaagacagataaggctatagcatgaagcatattagttcgaggaaggatttaaggtgcggaggccagatctgaaagtaatgaaacaactccagtgcaactgtttcataactggttctctttgattcttctagaaagccatgtcctgccaccgcagccagctcctctggttccgccgcctctacattatcttctcccggtacatgagaatcaactcactgagcttcctctgaagccttgaagggttttcagatccaaggaacaaaggggaaaatagacaaaggagtgcagaggacctggcctggcactggcttatttacctgagctcaaggagatccccgctggagcagcctctgcaaaagggagcccatgtaggccaggggctgtccaaactccagcttcttcccctgggaaaaaacccaaagaaccaaaaacaaaccaccccaaggataataatagctacactgctagcttctcaagttcttgtgaaaaacaatttacataatgacacagtagatgtggaacacctagcccagtgcctgggcaggtccctattatcataaatgaacataaaagtgctctaaaaacactccacagatgtgacttttacattgtttccaaagcaggttcaccaaaaacacatacacaaaatgcaacagtgtgtgttgaattggttcaatcataattcctttgatttttcttgtatcagaatgtgggtctaggaaaaacttgctctatttaacaggacagctctgattgaagcatccaagtacaggtcactggggtgggcactgttttatacagagacgattacaagaactctgcctcaaagagcttacaatcaaatatgtcagctctcagtctttttggagaagtaggaagtaggaagataaatctgagacttaaaaaaacacaaaacattcaagaacctgatgtcttaaaattgtcctacgaacaaaagctctctgaaagctctggcttggaaactactctcagaatccagctaacgctccagggaagtggcctgagtcagggaagctaagtggtgaagagcacaggctggtagtcctgcgattgaagccagaatgaccagctgtgtaaccaaaggcaaggtgctgaacctttctctgcctcaattctctcatctgcaaaatgggaaataataatgatcccaacctcagagaactgaacaagataatacatgaaggtgcatatcaaagagtctcacatgctctgctgggtaagtatgccctccacccgccacaggaaacactgaattgcttctccatagctgcaggttagagacctgcttgttcagacactccacctcaacttgccctcctttgcttagtgtcaccattatcttgaatgcctcctaggggccacataagactaatagagctattaggctctgaagccggaatcaaaaatgcaaatctggttatgtgatttgtctacttaaactttgtcaatagctcctaatagccttcatgtgaaaatgtgaccagaagcacgttactaacactggctagagtgcagtaggagagtgtggtaggacaggctgacccctgccctgttactaggaagacagacactcacccagcctttctgaacagcaactctgctaagagcttttaaaatatgcatattctatgacctaaggaatacttagaaaatcaaaattatatacacactggctgggcgcagtggttcacatctgtaatcccagcactttgggaggtcaaggagggtggatcacttgaggccaggagttcgagacaagcctggccaatgtggcaaaaccccgtgtctactaaaaatacaaaaattagccaggcatggtgccgcaggcctgtggtcccagctactcggaaggctgaggcacaaggattgcttgaacccagaaggcggaggctgcagtgagctgagatcgcgccactgcactccagcctgggcgacagagccctgtctccaaaaaaacaacaacaattatacacacaaagattatcattgtattatttataatagcaaaactggaaaaatccagtgatgcagttgtgttttgtaacaaggaagaacgttcacactattaaatttttaaaagcgggttaggaatagcacaatcccatttttgttgaataaatatatacacaagtatataaataaatacatatatatcaaaagatatatatccaaaagataaatactagctggcaaggtaatctttcaacaatgaacatttataattgtaaaggactttgttgttgttgtttatggatcatttggatgtgagaattttgatatcatgtgaagttttttaaaaagtgtgtttataggcccggccgcggtggctcacgcctgtaatcccagcactttgggaggctgaggcgggcagatcacaagtcaagagatcgagaccatcctggccaacatggtgaaacctcgtgtctactaaaaatacaaaaattagctgggcatgggggcgggcacctgtagtcccagctactcaggcggctgaggtaggcaaattgcttgaacctgggaggcggagattgcagtgagccgagattgcgccacagcactccagcctgacaacagagcgagactccatctaaaaaaaaaagtgtgtataggccaggtgcagtggctcacacctgtaatcccagcacttcgggaggctgatgcaggaggattacttgagctcaggagtttgaaaccagcctgagcaacatagtaagaccccatcttttcaaaatattttaaaattacccaggcttggtggggtgtatgtatagtcccagctactcaggaggctgaagtgagaagatcacttgtgcccaggaggtcgaggctgcagtgagccatgatcataccactgcactccagcctaggccacagaatgagactgcctcaaaaaaaaaaaaaaaaaaaaaaatatatatatatatatatatatatatatatatattaatcttagaggttagaaagatgaacaaaattatcaatatttgtttctggatggtgagacttaaaacatttcctgcctcttttgttttactgtacattccaacttttttgaaataattaagtagaagtcggccagtgcggtggctcacgcctataatcccagctacttgggaggctgaggcacaattgcttgaacccgggaggcggaggttgcagtgagtcgagatcacaccactgcactccagccttggcgatagagggagactccatctcaaaaaaataaaataaaataaaaataaataagatttaaaaaataaaaaaaagagggttgctgcatctgagactgcaggttctactctgggttctggaaagaggacagaccagaactaggctctccttggtaccagcagagagccaagggactgcagcacaggagggaaggaagcccctggaggccagttagggcagccactagcagtgccttcatgagaaaagtaccctccagattcaatgcagccctggggacacttgtcctggcaagaaaagagtgtcctcgtgcaaattatcaacaagtagtctttcctgcctgcaaacacactccctccccagggacagccacaaacagccttgtagaaggagcagagacttaagcatccacttagccagatgctcttgtttggttaacaacctgcaaaactaggcagcagtagccccaaagcctggagcaaaaatcagaatttcatggttccttgaaggaacaccaaaaaaaaaaaaaaaagaagaagagagagaatcctctcctccaactgcccaaatagaaaggatctcagtgaattaagaatcctctgggaggggcagcaatcccacttgctcagagacctggagagtgaccaggctggggtgggtgtgctgaagtcaggagagggtcaccccttgtcagagagacctgcaaacaatcccccacccaccccatcctcggcaagggctgatggtttgccagttctcacctcggtccagagagcagaaactgccaacttcaaccactccccgcttggctactactcagcagccctgactcattaagaaaacacaaaaatcgagagcaaccagacacaatacaaaaggggaaccctcacctgaggaggctcagaaggaggggaatagggcagatctcactgaagtagcaattaaatggaagagactttatcagaaacagtagtgaaagcccgggcactgacccagacaaaaaagcacacttctccgtggtgaccaaattagtaatgtggaatatcaagtagaagatatattgcagaacaaagaggttaaaaagccaagaaatggaaataagggtgggaaagagatttgaaaacacattaaggagagccaacgtgaataatggaagttccagaaggagcaaaagcaggaaggtaataaaggagaacttccgtaatctgaaggagactgagtacactgaaagagcccgccaaatcctaggcagctttgatttttaaaacagatgcacaaatatgctgcgaaattcctaaattcccagtgagaagggggagattaaagtattcaaaaagtctcctcttggggccagccaccgtggctcacacctgtaatcccagcactttgggaggctgagactggcggatcacttgaggtcaggagttcgagaccagcctggccaacgtggcgaaaccctgtctctactaaaaatacaaaaattagccaggcgtggtggcgcatgcctgtaatcccagctacttgtgaggctgaggcagcagaatcacttgaacccaggaggcagaagttgcagtgagccaagattgtgtcattgcactccagtctgggctacagagtgagactctgtttcaaaaaaaaaaaaaaaaaccaggccgggcgtggtggctcatgcctgtaatcccagcactttgggaggccgaggcgggtggatcatgaagtgaagagatcaagaccatcctggccaacatggtgaaaccccgtctctactaaaaatacaaaaattagctgggcatggtggtgcgcgcctgtactcccagctactcgggaggctgaggcatgagaatcgcttgaacccaggagacagaggttgcagtgagccgagattgtgccactgcactccagcctggcaacagagcgagacttcatcaaaaaaaaaaaaaaaaaaggtgtcctttgcggccaaggggaagctgggctgggggtaaagctgcatggtgcagggtgacaaatagacaactgatgggctgcagtctggattgtgaggaactgaaaggtatacagttccagagctgaaactaaaaagcatgggatctcaattaacaaagaggaaagcaggaaatgaagaaaaacttaaaagactgcaaaagtaagaaaaaaggaaaatagtataaaatgtaataaatataatagaagtaatacaaaaagaataaaatcagagctacttcaaaaaatatgaacaggctgaatttccagaccaaaacagactgtgaaatcaatgtgttagaaaacaaaatctagctacatctaaaagtaacaaaggctaaaaataaaaggatgaaccatataccatgtagcaggagaacaaaaagaaggaagagcaacaccagaaatccaggccaaacccaatatgacaccaagaagcattaaattggacaaagatgggtatgttaacaggttcactccatgagatgacaggcacccaacatcacagtagccagatacataaaacaaaacctcccagacatacaagacctttattaaaagacaaaaacaaacaagacaccacgataatagtaggaggcctcagtattcttccagaattttgaaaaattgagttggcaaaaaataacatcaaatattggaataaagcaaacattcacttatgtgatagaatgtttacaaaagttgactgtttattggccactgataaatccatttatttatttatttatttgagaccaggtcttgttctgtcacccaggcttggaatgcagtggtgtgataacagctcaccgcagcctcaaattcctgggctcaaggaaccctctgcttcagcctcccaagtagctgggactacaggcatgtgccaccacccccggttttttgtgggttttgtttgtttgtttgtttgaaatggagtctcactctgttgcacaggctggagtgcagtggtatgatcttgactcactgtccgccttccgggttcaagcgattctcctgcctcagcctcccgagtagctgggattacagatgtgcgccaccacgcccagctaatttttgtattttcagtagagacaggattttagcatgttggccaggctggtctcaaactcctgtcctcaggtgatctgcctgcctcggcctccgaaagtgctgggattacaggcgtaagccaccacatcctgccgttctttttgttgttgtttgtttgtttgtttgttttaatgagacgaggtgtcgctatgttgaccactttggcctcccaaaacgttgggactgcaggcataagccactgcacccagcagagaaatccctaataaattccctactgtagagatttaataggccacattcttggatcataattaaataacatgcaagtaaataataaaattactaaagagggggataaacaacacaactcagaaatcaagaagccccttcctaaataacccctagatcaaagaggaaatcaaaattggtattatgaattatctagaaagtaatacaaattaacacttgatgtgggatctgtatttaggtaatttgtagtcttaaatgcttaattttttaaaagattgaaaataagtgaactacatgattcaatttgagaaaatcaaaaatagaaaccaatagcaagagggacttaatagagatataagattagattaaataagtgaaaccaaaaaatagtggaaagaataagttttctttgaaaaatgaaataagccaatatactgcaagtctaattcaggaaaaaagaaaacaaaagtgcagttattgggaacagatggatatataaccacaaaagtgaaaaaggctgaaaaaaattataaaatattatatggcttgaggtcaggagttcgagaccagcctaggcaatatagtgaactaaaaatacaaaaattgcccagggaggttgaggtgagaggatggcttgagcctgggaggcagaggttgcattttgccattgcactccagcctgggtgacagaaccagaccctgtctcaaaaaaataataaaaaataagtgttggtgaggatgtaaagaaattggaaccctcatacattgttggtgggaatgtaaatgatgcagctgctatggaaaacagtttgatgttttcttagtaattttaacaaggatttaccacatgacccagcagctccactcctaggtacatttcccatagaatggacaacattcagacaaaaccttgtaaatgagtattcatagcaatattattcataatagcctcaaagtagaaacaactcaaatgtctatcaactggtgaataaacaaaatgcggcattttattattcagccataaaaaggaacaaagtcctggccgggcacagtggctcatgcctgtaattccaacaccttgggaggccaacgcgggcggatcacaagatcaggagttcaagaccagcctggccaatatggtgaaaccccctctctactaaaaatagaaaaaaattagctgggcgtggtggcacatgcctgtaatcccagctacttgggaggttgaggcaggagaattgcttgaacctgggaggcggaggttgcagttaactgagattgcaccattgtactccagcctgggcaacagagtgagactcagtcacaaaaaaaaaaaaaaaaaaaaaaaaggaacaaagtattgatgcatgctacaaggcaaatgaacttcaacagcattatgctaagtgagagaagccagacacaaaaggtcacctatgtaggattccacttccgtgaaacatttaaaataggcacattttgagatggaaagcagattagtagttgccagaggctagaggaagtggggagtgggcagtggctgctaatggtacagggtttctttcttttttaaaaacaattttatatattaaaaatattttaacatagggtcctgccttgtcacccaggctggagtatggtggtgtgatcatagttcactgtaacctagaactcctaggctcaaatgatcctcctgtctcagcctcccaagtagccaggactacaggggtgtgccatcacacctggctaattttgttttttaagagactgggtttcactatgttggtcatgaactcaaaaacactgaatactaaagtatactaacactgaattgtacacgttaaagggttgaattttatgttattcaaactgtatctcaattcaaaaattcacgtgaaaataagattgcattaaaatattctagttcactataaaagatatacacaagctaaatttgatgatcacgccgggtgcggtggctcacgcctgtaatcccagcactttgggaggctgaggcaggcgtattacgaggtcaggagatcgagaccgtcctggctaacacggtgaaaccccgcctctactaaaaatacaaaaaattagccgggggtggttgcagacgcctgtagtcccagctactcgggaggctgagtcaggagaatggcgtgaacccgggaggcggagcttgcagtgagccgagattgccactgcactccagcctgggagacagagcgagactccgtctcaaaaaaaaaaaaaaaaaaatctgatgatcgctttctgcacctagtgatactcacctaacacactagcccattaaacacaaatactacagaatacaacatttgttgttattttgaacaacttttagtgcttcctgtttttcttttaacagtttttaaaagataaaacgaattaatgcagaacataaaacaagaattgaataaatggagagttgtgccatgttccttgatagagatttaaaaatcctcatacagttcatatataaatttaatactacctatagcatctataaattccaatatagaaatttaaatatttacatatgtatttatatatgtatatttattcacattcttacaatgttaatatataaatttaatgtaattctagtcagaatatcaatggattatctttgggatttgaattaaattattttaaaaatatattagaaaagaaaatgtccaagtatcgccaaaatataaacatcaaaaaggatagtgacgtgaggcctgcctttctatatattaaaacttaggccaggtgtggtggctcacgcctgtaatcctagcactttgggaggctgaggcaggcggctcacgaggtcaagagttcgagacagcctggccaacatgatgaaaccacgtctctactaagaatacaaaaattagccaggcatggtggcgcgtgcctgtaatcccagctactcgggaggctgaggcaggagactcgcttgaacccgggaggcagaagttgcagtgagcctagtttgcaccactgtactccagcctgggcaacagagcaagactctgtctcaaaaaaaaaaaaacagcaacgatcccatgcaaaaggacgacaaatagcataagacagctaaggataaaccgaaccctacagcgtgctgttcatactgtttccataaagagaacagcataaaacttgaagagtgggaaagaacaaacccattggtgagccatattaccttcctggatgataaagcagtactgtacagaagtctgttctccctgaattaatttataaatgcaatataattgcaaccaaaatccaaacatgctttgattgcatgatacttgactcactaattctaaaattcatctgcaggacacagtgcacaaaaacagaataatatggccaggcaccgtggctcacgcctgtaatcccagcactttgggaggcctgaggctgacggatcacctgaggttgggaattcaagaccagcctggccaacatggtgaaaacccgtctctactaaaatataaaaattagctgcgcatggtggacacacctgtaatcccagctactcaggaggccgaggcaggagaatcgcttgaacctgggaggcggaggttgcagtgagccaaggtcgcaccactgcactccagcctgggcggcagagtgagactccttccccaccccccaccccacaaaaaaagtgtaatatggcaggatttaccctattagattgtttaaggcacattataaagcttggggatttaaaataatttgttatttgtggaactacaaaaaaatagatgaaaagaacaaataagagtccttaaaaaccctgattagtatatgtaacattttaaataaatgaagaatggatggattcatcaataaagtgttgagccaccagttatccaatttgaggataccattcacaaaatttagaggaagaaaaaaaaaacccacacacaaatccaggtagatcaaagaactatatgtttaaaaaacaaatagccgggcgtggtggctcacacctgtaatcccagcactttgggaggctgaggtgggtggatcacaaggtcaggagtttgagaccagcctggccagcgtggtgaaaccccgtctctactaaaaatacaaaaaattagccgggcatggtggcatgtgcctgtagtcccacctactcaggaggctgaggcaggagaattgcttgaatccagcaggtggaggttacagtgagctgagatcgcaccactgcactctagactgggtgatagagcgagactccatcttaaacaaacaaacaaaaccaataaacaaacaaaagtcagtaaaagtagtagaagaaaatacaagtaaatatgtttataagcttgggtaaggaagaattttttttttttttttttttgagacagagtcttgttctgtctcctaggctggagtccagtggcttgatcacagctcactgcagccttgaattccttggctcaagctatcatcccacctcagcctcctgcatagctaggactcaggcatgtgccatgctaagctaattttttatttatttttaaaattaattaatttttttttttttgggacagagtttcactcttgttgcccaggctgcagtgcaatggtgcaatcttggctcgccgcaccctctgcctcctgggttcaagcgattctcctgcctcagcctcccaagtagctgtgattacaggtatgcaccaccatgctaggctaattttgtatttttagtagagatggggtttctccgtgttggtcaggctggtctcgaactcccgacctcaagtgatccacccgcctcagcttcccaaagtgctgggattacaggcgtgagccattgcgctgctaagctaattttttttttttttttttgagacggagtctcactctgttgcccaggctggagtgcagtggcaggatctcggctcactgcaagctccacttcctgggttcacgccattctcctgcctcagcttccctagtggatgggactacaggagaccgccaccactcccggctaatttttttgtatttttagtagagacagggtttcgccatgttagccaggatggtctcaatctcctgacttcatgatccgccctcctcggcctcccaaagtgctgggattacaggcgtgagccaccacgcccggccctgctaagctaatttttaaaatttttttgcaaatatgaggtctccctgtgttgcccagtttggtctcaaactcctggcctcaagtggtcttcctcatttggcctcctaaagtgctgggattacaggtgtgagccaccacgcctagtcccagaaagatattctcaaaaaagaaataaatcacagccggctgcggtggctcacgcctgtaatcccagcactttgggaggccaaggcgggcggatcgcaaggtcaggaattcaagaccagcctgaccaacatggtgaaaccctgtttctactaaaaatacaaaaattagctgggcgtggtggcgcacgcctgtaatcacagctactcaggaggctgaggcaggagaatcgtttgaacccgggaggcagaggttgcaatgagccgagatcatgccattgccctccagcctgggcaacagagaccgactccatctcaaaaaaaaaaaaaaaaaaaaaaagaagaagaagaagaagaaaaaagaaataaataaatcacaaaaaacccagaaaacccaagtcagagagccactaagacaaaagaaaaaaaaaaaaaaagactaatgaatttgactccatcaaaaattaaaactcagccaggtgtggtggctcatgcctgtagtcccagcactttgagaggccgaggtgggtggatcatgagttcaggagttggagaccagcctggccaacgtagtaaaaccccgtctctaccaaaaatacaaaaaaattagctgggcgtggtggtgggtgcttgtaatcccagctacttgggaggctgaggcaggagaattgcttgaactagggaggcagaggtttcagtgagccaagtcacgccattttactccagcctgggcaacaagagcgaaactccatctcaaaaaaaaaaaaaaaaacccaaaaaaacaaatgcatatctttcagctcagcaatcccacttctctattctcaaataatacacatatgtatgtataaagaggtgtgtacaagaatgttcactgtcaacactcttggtaatagcaaaaaactgtaaacaatcataatttccgtgaaaaaaagaatagctaaataaactacacccacactatgctgttctatgcaacagttaataatgaggatatgtatattgatatgaaaagatcaagatgtaattaaataaagaaatgcaaccgaatgcagtggctcccacctataatcccagcacttagggaggccaaggcaggaggctcacttgaggccaggagtttgagagcagcctgggcaacatagcatgaccccatctctacaaaaaattttaaaaaattagccagggggtggcacacacctgtaggctgtggtaggactgcttgaagtaaggagttcaaggttacagtgagctgtgatcacatatccctaaaaaaaataattttttttttaagacggagtcttgctctgtcacccaggctgtagtgcaatggtgcgatcacagctcactgcagcctcaacttcccgggctcaggtgatcctcccacctcagcctcctgagtaactgggactacaggtgagcaccaacacacccagctaattttttttactttttatttacttatttatttatttatttatttattttttgagacggagtcttgctgtcacccaggctggattgcaatggcacacaatcttgacttactgcaaccaccgcttcccaggttcaagcaattctcttgcctcagcctccttagtagctgggattaaaggtgtacacaaccatgcccggctaatttttgtatttttagtagagatggggtttcgccacgttggccaggctgggctcagactcctgatctcaggtgatccacctgccttggcctcccaaagtgctgggattacaggcatgagctaccgcgcccagcctgattttttgtatttttagtagagacagggttttgccatgttctcccaaagtaccggaattacaggtgtgagccaccgtgcttggcccctgtataattttaaaattaaaaaaaattaaaaatacctggagttctggcctcgaaaatcccatccttgtgcgtgctgcttccagtcttgaagagtgaacctggccatcagtgattctgaagagacagtgaccacatagaacccagcacagcaaactgagaaactgccatttttattgtattttattgtttcctgtagagatgggggggtctcactacattgcccagtctggtcttgaactctagggcttaagcaatcctcctgcctcagccttccatagtgctgtattacaggtgtgagccaccatgcctggcctggccatctgtattttttttgtttgtttgttttttgtttttgagacagagtctcactctgtcttccaggctggagtgcagtggcatcatctcagcttactgcaacctctgcctcctgggctcaagccattctcctgcctcagcctcctgagtagctgggattacagatgcccaacaccacgcccagctaatttttgtatttttagtagagacgaggtttcaccatgttggccaggctggtcttgaactcctgacctcaggtgatccaccggtcttggcctcccagagtgctgggattacaggtgtgagccaccacactcggcatttttttttaattttttttttttttcctcagagacctttgttctgagatctttattccctctccctgttctttttccttgtctagtctacctcacaaatcatttcatgagtaatttccctaaagcaaagagcaaatatttattaagcatttgccattatttgtactcagtatttggtaatggcaggaatgtttgaggaaagctaatatgttagtaatatggagcaatgtgaagttaagaagagagggagatggcaaccaatcagaagactatatgaggccaggctttattcatcctgttcagaggtggtcacagcttcccaatgcctgcaaaataaaggccaaattcctgagcctaatatccaagaccatccagtctatcctcaacatacctttctgatatcttcattacttcttcccattaaaagcctccaattcagccaattttttttttttttttttttttttgagatggggtcttgctgtgtctcccagggtggaatgcatgacaccatcatagctcactgcagtctcaaaactcctgggctcatgtggccctcagcttcctaagtagctgcaactacaggtgtgcaccaccacatgcagcttcagcctggcttttgcatgtgtgcgtacctgttcagttacttctcctgtctccttaaaccttgcttcctttattgattgattgattgaatgattgattgagacggagttttgctcttgttgcccaggctggagtgcaatggcacgaactcggctcactgcaacctctgcctcccgggttcaagcaattctgcctcagcctcccgagtagctgggattacaggcgcccgccaccatgcccaactaatttttgtatttttagtagagacagggtttcaccacattggccaggctggtcttgaactccagatctcaggccatccaccagcctcggcctcccaaagtgctgggattacaggcgtgagacaccatgcccagctgaaatcttgcttcctttaaaaataggatcaaagttgttgtttcatgggtacagagtttcagttttgcaaggtgaagagttctggagatggatggcaatgatggctacacaacaatgtgaatgtacttaacactgctgaattgtacacttaaaaatggttaaggccaagtgcagtggctcatgcctgtaatcacaacactttgagaggccgaggcaggaggactgcttgagcccaggagtttgagaccagccggggcaacatggagtgaccttgtctttacaaaaaatattagccggatgtggtggcacacacctgtagtcccagctactccagaagctaagaggggggagatctcaagtctaagtcaaggttacagtgagccatgttcatgtattgcactgcagcctaggtgaccgagcaagacagtctcaaaataactaaagagagagattctgtctctaaataaattaacagtttatggtaaattttatgtgtattttacaactgaaaaagaaattagaagctgatttaactttttaaagatagactcaaatcgtactctcctcaaggcttccctgagttctctcctttgaactcttagagctcttattatctttacagctcacatggattgtaaccattcacaatttttttttttttttttttttttgagacagagtctttttctgtcagccaggctggagtgcagtggcgcaatcttggctcactgcaacctctgcctcctggattcaagcaattatcctgcctcagcctcctgagtagctgggattacaggcgcccgccaccacgcctggctaatttttgcatttttagtagaaacagggtttcaccatgttggccaggctggtctcaaacacctgatctcaggtgatccacctgccttggcctcccaaagtgctggaattacaggcgtgagccacagtgcccagcctttttttttttttttgtagatggagtctcgctccatcacccaggctggagtgcagtggtgcaatctccactcactgcaacctctgcctcctgggttcaagtgattctcctgcctcagcttcacaagtagctgggactacaggcacatgccaccatgcccagctaatttttgtaattttagtagagacggggtctcaacacattggccaggctggtcttgaactcctgacctcaagtaatccacccgcctcagcctcccaaagtgctgggattacaggtgtgagccaccatgccctgccacaatcttccatttttaataattgtttatcttatgtcttctttccaatttagctacacatttttttcttttttcttattttttttttgagacagtctcattctgccacccaggctggagtgcagtagcacgaacacagctcactgcagccacaacctcctgggctcgatcaaccctccggagtagctggaactacaggcttaagccacaatgcctggtggcaaacatcttgatagtgctgagtatatatctgctattaatcgactggcctcagaagcaaatcacagtacaaaagaaatgataaaccaaagtgactgctttaatgttaaaaatatttattttttttcctaaaagatcacacaaaagttgggaagagaaggatgtcaattagactacatcaaaatctgggcagagggaggacaaagagctgcctaaagaaactggtagctggagcaaactgcagagatcaagatgaccctagtcaacggaaccagcagcccaggtcagccacattcaggagcaccaccgaggcacggcagggagagcaaagttgctggccccaatcattcctccttttcagggcaggagaggcagaagctcactctttagacatgttcttgatggtcttgtgctctttcatggccttctcccaatcgctgccattgaattcctcagtgaccatactccgcacagtgccctcatccaggcagtggggggcaattcctacgagaaagtggcacagacaaagggggatcctcagtatgggtgagaccagatggtgtaccggctcctggataagcccccacctgcaggcatcatcacgctacacattagggcttccaaaggatatgccacagcttatggcttcagtgatgagacccacaggctgccagctggctcggaaagcactggctccagcctaccgcttcagccctctgactcactttcctcaactgccagatgggaatcacactccctgagccaggtttggccaaggctagacaacattcaataccaagttgagagtacaacatgcagaaaggcacagcccagagcaatctctgactggcagcctgaagaattcacaggcctttcctgtgtttagatagataactttctttccttttttttcagatggagtttagctcttgttgcccaggctggagtacaatggcgtgatcttgactcactgcaacctctgccttacgggttcaagtgattctcctgcctcagcctcccaagtagctgggaatacaggcgtgcgccaccaagcctggctaattttgcatttttagtaaagatggggtttctccatgttggttaggctggtctcgaactcccgacctcaggtgagccaccatgcctggcctcagatagataactttctaagaattaaatgtcttcccatttgcacaggatttcatacttttcaactctttcctgttctgcaaggtagacaggaaggagtctccatgtgacagatgaggaacaggaggccctgaagcaatgggggagcggtaaggatgacatcctgccctgccctgcctcccccacctcccctgtccgctccccaccaccataaggcaaaagacactgacagtcatagctgctctcgcagctctggaggctgcactgacacaacaagagtcctcagaacatcttccacctctgctttccccttcaattcacactatagttggtatgattctcaacaactgtcagagggttagttttattactccccagacccaagcaggccctgaagcggggcttggagggttccctgcttgtttattattttttaaaaagaacagagatacggttttgctatgtttcccaggctggtctcaaactcctgagctcaagaaatcctcccaccttggcctcccaaagtgctgggatacaggtgtgagccaccgcagccagccagtcctgcctaatttttgaacaaccaaaaagctttcaaatgccattatcaatgctccccaatcttgcctccttcactcccttaacccctgtcattattaaagctgcctcccctggccccacaagcccatctcctcacccctctcctccctacccttcaacaccatccccagcaacaccagctctaccagcaccagtgaataagaatcacaacctggatgggctccaagtccaacttcaccacattcagatatgggattcagaaaagtttcaccggagcccgactcacattctatcatgtggaaagcgctctgctgaggagccctgttcctctaagatacgcatgtgacagggtctagtcagcatcccacctgtccaaataagactttaaatgagagcaccatgggcctctctgtgtccccctgagcttgcagtccatcccctttactcaccgaagcctccggggtttgatcgtggagtatagaagctctgaacgccacatctcttacagaaggtatgctgggctttgtgagtattgaacgtgtaagtcgttatgtgctcagctccctaggtgaaaacagacaaacggtattcttttttacaaagagatttatttatttaatttatttatttatttatttattgagacagagtctcccactgtctctcaggctggagtgcagtggcgcaatcttggctcactgcaacctccacctgcatgggttcaagagattttcctgcctcagcctcccaagtagctgggattataggcgcgtgcccccatgcccagctaattttttgtatttttagtacagacagggtttcaccatgttggccaggttggtctcgaactcctgacctcatgattcacccaccttggcctcccaaagtgctgggattacaggtgtgagccactgcgcctggccccaaagacatttatttttatgtcacttaaaaaatacacctttgtagccgggtgtggtggcaggcgcctgtagtcccagctactcgggaggctgaggcaggagaatggcatgaacctggaaggccgagcttgcagtgagccgagatcatgccacggcactccagcctgggcaacagagcgagactccgtctcaaaaaaaaaaaaaaaaaaaacacctttggccaggcatggtggctcatgcctgtaatcccaacactttgaggccgaggcaggcggattgcttgagcccaggagttcaagaccaacctgggcaacatggcaaaaccctgtttctacaaaaaaatataaaaattagccaggtgcagtggcacacatctgtagtcccagctacctgggaggctgaggtaggagcatcagttgagcctggggaagtagaggctgcagtgggctgagatcgcaccattaaaaaaaaaaatcttgaaataacttaatggcaggagctcttctgtagggctctttgtactaagaggccatttcctatctccagaagagactgggaccttcttgaggacagagacccatctacactatccagagacatgtcagtctggagcgtgacagctcacagcttcccttaggtcaacggcatacagaattcagccttgagccttccctgatacatcacatcagggagggaaagtgcttgcttcccagggcctatgtggagagacagttcacccaagggactggctctccatgtccccaaacagaacggctcaaggtcttaagaaaactgatggctgtgcttaatttatccacaaaggacaaaccaggaaaaaaatatttgccagacgtcatagacaggctaatttccttaatggataatacaaacgggagactggacaaaggacatgaacggacagttcagatagaaagaaaaataaatcactctttagcctatgaaatgctcaccaaaggaacttcaatgagatgtatttcactgtcaggtgggcaaaatcaaagccgttaacatggtattgacaagtatgtagagaaatatgtgctcacatatatcagtcacaggaacaggaattggtacaatttagcaacatctaccaaaattttaaagtgtacatatgctttagcacacaattccatttcttgaaatttattatacagatatattccaaatgtctcaatgacataggtatatagatactatagcactgtttatgaaggctaaagattggaaaaattgaaaatgtccctcaatagaggaccggttaggcattatggacactcataaaatgaaatattctccaacttttgagaagaatgagacagctctacaaaactaacatggaacaattgccaaagttacaaagtaaagcaaggtataggccaggcgcagtggctcacgcctgtaatcccagcactttgggaggccaaggtgggcagatcacttgaggtcaggagttcaagaccagcctggccaacatggtgaaaccctgtctgtactaaaaatgtaaaaattagccagatgtggtggcgggcacctgtagtcccagctactcaggaggctgaagcaggagaatcacttgagcctgggaggcggaggttacagtgagccgagatcacaccactgcactccagcctgggcaacagagtgagactgtctcaaaaaaaaagttaagcaaggtataaaacaacgtacgtggtatgctaccatttctttttttttttttaaggctatatactggtatgtgtggtgtttttgttttgttttgttttgtttttttgagacaagatctcactctgttatccaggctggagtgcagtggtatgacgacagcttactgcagccttgacctcccaggatcaagtgattctcccacctcagcctcccgagtacctgggactataggcatgcaacaccacacctagccgattttttattttttgtagacatgggggtctcgctatgttgtccaggctggtgttgaactcctgggctcaagtgatctgcctgccttggccttccaaagtgctgggactacaggcatgagctactgtgcctggcctgtatgtgcttttatatgcatatgtatctttgaagagggatccaagaaacagtggcttacctttagggagagaaatcagacagctgaaggggaaggggtggaggtttcttatccttgttaaccctctttacgcttccccagccataccgtccagaattgtgcttcctatagaaatagctccctgaggagccttgctcactccatagccactgcagcacagaaaagcagcgaaggactgccaagtggtcccaagccatccagcattatctggatggaattaaagccccgcccaaccccacattacccataatgtgctaaaagtcttttttaaaaaatctgtattctttaacctggagattttctttctctctttttttttaactgctccttgtagagcagggtgtaggaagtgtgcccagaatagccagagaacttatttctaagagaattgatcctaaagaagaaatttctaaattgtcaaaaatgtataccaaggaggttcaccagtgttgttgataatcagaaaaaaacgggactcaactgcaatgatgcagagacagtgatggggtaagtagaccaggaaatcggctgtggggaagagggagactggggcatggggacagtagggaaagatttttcactgtgtatatacacattttcttctacctttcaaattttgtaccaagtacaaaaaattccccaaaataataaaattaaagttacaaataagtatataagcttttcattgggaaatgagataagcagtttatcaacaaaaagaatggtaaaattctacttaataaacataagacaataggtttagatgtatttctcagagtagaaaataatacacaaagacagacaccaaaatattaacagtggttacctttagttgacaggatttgggtgattttattgttttttgattctctgaatttgaaaatgtttccacaataccaaataggcctccaaaaaataaaggtaaaaaataacacaaccttttattttttattttcattttttttgagatggagtttcactcgtcacccaggctggagtgcaatggtgtgatctcggctcactgcaacctccacctcccaggttcaagtgattctcctgccttggcctcccaagtagctgggattacaggcatgcactacaacgcccagctaatttttgtatttttagtagagatagggtttcaccatgttggccaggctggtcctcaactcctgacttcaggtgatccatccatcttggcctcccaaagtgctgggattacaggcgtgagccactgtgccgggcccaccttttaaatgtcaacctgaaaccaaagcccgtgagaggccctgctatgctccaggcccctcccatgctacagacggcatgctaacagttgggtggggggtcctgtaaatctcaccaatgggttctgcactccttgaccctgctcttaagcactgaccttcaggagcttgaagcgagaagctggaacaatgaagtgtctattctgcttcttcttgcaaatgctgcaactacagaaagacagagcaaattccagattgtgagcagccacctgcatcctctatgcctgagcggcccagccatgagagccagccgaccccacagatgatgcccctttcagcaccatccagggccgaggagctggggcaaaggcctggatagcagtgcctctggtttgcaggtacagcagagcccaggggggtcccaagtcagcagtcgaggttctgcaatgctcagaacacaggaccaacagacaggtctgtactgcccacccctcagttctttacagtgaagagaagcgctggacttcagagacacttaggaaacaaatttcagacactgctacaacctgatgtctctgagacatccacaccaaaaatggacaaggaagtttaggtttccctctttcttcatcaccacgtcacaagaagtccagctccaagtaaaacacgtccccagaattaccatctctggaattaaactgaagtcccctcttttcaggccacctttgaaaaagttctaatttagcacagaatcctctcacaagttattccacagtgcttcttttccaatctggactctattgttagtagcctggtcagttctccatttgagtaattccatcgtatgtgcttattattcatatataattccggtacctaggggcaaaaaggactggatgctgttaaataattagctgcatgccaactttgggtcccaaagccagagcctgtcgtccctgctccatcataacgccggggaaggtggtacaaatcaggccctccacagccagcagtgccatctgcctcaaccgaagagcagagcgagagtggagggcctggggagcctccaggtgtatacaccctttactaacataccctccaactctccccaactctagacttctatgaagattctgcccaaggctttccactcagtacccagccaggcacacctgcagctaaccgcccccggctcctcagcagtgtcagtctgagggtgatgctgccacaagccacaagccctgaggaccctgctctgtgtcacctgggccatgctgttgaagctctgtgatgagccatataaaaggaacaaaaatagaacaatgaacctttctgtccccatcacctgacttcaacagttaccagcccaaggccaatgtttcctctgtaccccaactccccagattattttgaaatattgcattttaactctgaaattcttttaagccaatttagggaaaaaaaaatactcacttgcagtcaaatatatgcaagtctgctgaggcccaaacttcaaaacgaactgctccacagtggcagcctcctgtgtgcttcaccaggccctggtattcactaaatgaaacaaaaatcagaaagataataatttctgaatagctgcctcctgctctctttttgttgctgaaagaaagacagaagattagacaaaagtcttttctacatgacaaccagatgcatttctgcttttaaggaggcactgtcaatttcctaagtgaagaatggtttcagcaccttctttgtccatgagctctcttttcaccaatttcttaaattatattaagttgcaaaataaaacattccaaacatttcgaaaatgtgagggatcctaacccaccaccagacatttttatttatatgtcaaatactaaatttttttttttttttttgagatggagtctcagtctattgcccaggctggagtacggtggcacgatcttggctcactgcaacctctgccacctgggttgaagcaattctccagccttagcctcccaagtagctgggattacaggcgcctgccaccgcgccctgctaattttgtatttttagtagagatagggcttcaccatcttggccaagctggtcttgaactcctgaccttgtgatccacccacggggactcccaaagtgctgggattacaggcgtgagccactgctccgggcctcaaatactaaatatttttatgagctaggcacgaaggagagaacactaaacaagatacagcagacacgattgctacccttaccgaccttaacaatttactcaaataataattaattatgattgtgataaaggaggtacaggctgctatgaaaaataagactgtgtactcaatcaagtccagaggtccagaagagccttttgagaaacttaataaaggctcttatatttttgctctatttctttccagtattcttcatacacatgcgttttacatagttgtaatacacattacatagaattttttttttttgagagggagtttcattcttgttgcccaggctggagtgcagtgacgcgatttcagcccaccgcaacctccacctccagggttcaaatgattctcctgcctcagcctcccgagtagctgggattacaggcgcccaccaccacacccagctaattttgtatttttagtagagacggggtttctccatgttggtcaggcagtctcaaactccccacctcaggtgatccacccgcctcggcctcccaaagtgctgggattacaggcatgagccacctcacccagcctacatacaattttaaccctttaaagcttatatataagccaaactcagaaatgaacattaagatctgataaatgtcttaaaatcgctttccaaaaggattgaacacccttacccgataaataaatgagaaaacatttcactgtacagtctcaggcaataattataggaaaaatagctcactgcagttttaatttgcatgattaagactgatcattttttcatgtttctttacgtttatgtattttaattttttctgcacacataatgcttattgtaaaaactccaaacttcacactatttgagagtgctcaaagtgaaagcctcctgtaatctttacacccagagggatctacagttaattatttgttatatattcccccaaacttttttctacacaatattttaacgaaaatggtacagttatacacactttttgaatataatttagtagactttataagtacaaagtcatggcaatctagtgggagaaaaacagcttttttatgtcaatattttaaaactttttcttgaccatttatcagtttgtcttaaaataaaaatttatctcaaatttgagttttacattcttctttttttctgtatgccttgaagacaccatgagttttacattcctaaggatcttcgtattccttctgcccagaggcagccgtcaccctataggtgctcaaatgtttgatggatgaacgttttttaaaaattcagtgtgcagtccaagatgaaaaaccaaaaagtgaagcacacagaaaaccaaatatgtatcttctgtcggggacgactcatcctaagagaatttcttccgcaagaagctcaaaggaacatgttcaagaaaagaagtaattctcaggttatgcaattgctaggttattcttgtcggttttttccccctagtgttttgattgttctttttaattcgtaaaattgacactgaaatataatatcagggcgttaaaatatctctctgtagcacaactgttccccgaggcaggaatccagatcgcatttggagaaaagaaggcagccctttaacagcccagttaaaagctctttcccaaatcgcggacactcgagatgctcctcgggccatctaaaagactgcggagcagccaggagggcgagcggcagggagcattagctggctgagcacataaaagcctccctacgtaggtatccccgccgccgcgcgaggccggagcatctcttcgcgcgcgcttctctcccggatcaataacctccgccccctgctccctccctggcagtgcctggaacaatgacgggattttgcttcccagtgagttcaaaactattcatgcttccttcaacgcttctacctttcccttccacccaccctcaaaaacacgtgtgcaaacacaaaaaaaaaggggattcgggtaagagaaagccgtgggatttatgttcttttcactaagaaaggcccccacaccctttgcgcgccagcaagagacaacgtccccgagcacgatgcttatggccgggaaagactctttgtgtcccaagacggctgcgcgcgccctcaagctccggacgaagccccctttccattcccaggccacacagccctagaagcaccgccccgccccgccgcccttagaattaaggaataaccccagtgctaacgggggagccgcgtcggctccgtaacgtggaaggctcagagctgaaaggcgcccaaggcctgcacgcgggctgcgagcccgactcctgccgagggggtccgcgtggcaacggctcccgcgccccccggcccgccgcactcacaaggtgtctagcaggagcttggcggcaccctcggaggtaagcttctgccgcttctggaacgtctcccagcgctcccgctgctcgcccaggtccaggttggacgccgaggacgtcggggtcgcgggagtcggcggcggcggcggcggtggcgggagcaacgccagctcaggcggcggcggctcccccgggccctcctcctgggcccgcggcgacgagcgcctcagccgcggcttctccgacggcggcttctccaccgcctggctcttgctcccggcctggctagcggagcgccgtgtgcgggtggcgctgggtgccaaggcagcggccgcggaggccgcgggggccgcggaggccccggaccgcttctgcccgcgcagcttggcg

SEQ ID NO: 518 - DNA, 32152 bp, Homo sapiens
gttacctaaaggtaaggcttgttccttttgcaaagggccacaagatactgtccctctgagaaacttatgagggggaaatttgcaaatccacagagagctgccctcagccgagcagaggcagtggttggggaggccgccacactcttcctgactcacctcaaggtacctggcaggttgtatctaccagcaagtgcctgcctgcagggccacctctggatgagtggggaggccaggtttgcccctcaacctgtctagctttttcacagggtggatgttttacacctctggtattcttccagtctgaactcaatcccatcccccaaccaattaggcaggttgtaaatgactgctgggtgcttgatgaaccaatctgcctgagttaggaactcttcctaacccacataaagtatttgaccctacctgaccatttactgcatgacccccatgcttagcctctctggaccagtttctggtctgtcatacctcaccggcgcaatacgaagattcaatgaatgaaaacgtaagtagtttgtgccctttctatgtgggatgactgaaaggagcttaccaagccatgatgactttggaacatgactatagtttgtttgattcttatatcaatcctgtgagacaggcaggtctcacactatcaacaccaatttacagattagaaaactgagactgagagtggttaagggactttgccaagtctgtcaattcttgactgacagagctggaaccaggtctctaaactcccaatacagtaattcctgtctcctttacttcctttggctttgaggtagccagatctcaacctctagcagccaacctttttctggtagggcacaccgcagggtagagggtagccagccaggtcttctatggcccttttactcgttctagctgcaagaatcatgggcacagggcagctttagtgccacagaaacacgtggcaatgctgtggccactgtcctgccctgccctgagccacagggtagagggaggatgctcaggggaaaatctggctggaggcctcaaggcttatcacttcaccctgtctcctctccatccagggtgctctgtgctcacgcttcagtctgtgaatgtgctgcgcaagtacatctcccttctggatctgcccttgtctctgcttcatacgcaggatgtcctcttcgtgctcaacagcaaagaagtggcacaggccaaggtgaggattgtaaattcctggacaccccaactcagatccctgccccagaccccctgtctcctcaaagccccacctctgcagaagccctaactgaaggcttttcacagtggttcagcacctgtccctgagaattagggctaggccagctagatcttgggaggcatagatttttcaatgactttagccttttttttctaattataaaaataatatatgctttttctaaaagtaaataacacatgctcattgcagaaaatcttgaaaaacataaaagcatcaaaaagaaaataaaaataagaacaattacctgcagtcccaccaatcacaggtaatccttgttaacatgttgggctacatctttctactctttttttttttttgagacggagttttgctcttgtcacccaagctggagtgcagtggtgcaatctcggctcactgcaacctccgcctcctgggttcaagtgattctcctgcctcagcctcctgagtagctgggattacaggcaccgccaccacacccggctaattttttgtatttttagtagagctggggtttcatcatgttggccaggcttgtctcgacctcctgacctcgggtgatccacccacctcgacctcccaaagtgcagggattacagacatgatccactgtgcccagccctactctttatatatatatataatgtgtatgtgtatacacatttcaaatgggatcacacagtgcctatttaaaaccagctttggccaggtgtggtggctcatgcctgtaatcatagcactttgggaggctgaggcgggcagatcacgaggtcaggggttcaagaccagcctggccaacatgttgaaaccccgtctctactaaagctacaaaaattagccaggcgtggtggcatgcacctgtagttccagctacttgggaggctgaggcagaagaatcgcatgaacccgggaggtggaggttgtggtgagctgagatcatgccactgtactccagcctgggtgacagagaggattctgtctcaaaaaaaaaacaacaaaaaacctgctttaacaatacgttatgggctgggcacagtggctcatgcctgtaatcccagtactttgggaggccggggtgggtggactgcttgctgggcaacagagcaaaatcccatctctacagaaaaattagccaggcatggtggcacatgccagtggtcccagctactcgggtagctgaggcaggaggatcacttgagcccaggaggtcaaggttgcaatgaaccctgatcgtaccactgcactccagcctgggcaacagagccagaccctagccaaaaaaaaaaaaaaaaaaaaaaatcaaaactatttattatgaacattttctcctatttcatttagtattcaaataccaatggctgccaattacgccactgtatgtatataccataagatatatcacgaatcccttactgttagacattttgatttgccactttatcactgttatacatggagcgatgctcccagcttgagtttaagaagaattcagacctgccaggagcctctgtaaagagcctaggggaggccagacgccgtggctcacgcctgtaatcctaacactttgggaggccgagacaggcagattgtctgagctcaggagtttgagaccagccagggcaacacggcgaaaccccgtctctactaaaatacaaaaaagtagccgggcgtggtggtgggcacctgtagtcccagctactcgggaggctgaggcaggagaattgcttgaacccgggaggcggaggttgcagtgatccaagatcgcaccactgcactccagcctgggtgacagagcgagactccgtctccaaaaaaaaaaaaaaagagcccagggcagactgcaagaagcccacatgcagggtgaggaagagctaggccagctcaggtcatcctagggaaaactcttagctgtccatggaacaggtgactgagtgccatcagagttagggagagggtgggctgaggagaattattcctcagtttgtctccaggtgcatccccctgtagacttaagccccccacagagagatgggtagcataacaagtgaaagaaccaagtcggggattgtggctggtgcctgtagtctcagctgcttgggaggttggggtgggaggatggcttgagcccaggagtttgtgtctgccctgggcaacacagctttattaggaaaaagggaaggggaaggggaaagggaagggagagagaggaaggaagggagaaagagacagagagaaggagagagtgagagaaagaaaaggaaggaaggaaggaaggaaggaaggaaggaaggaaggaaggaaaggagggaggaaggggaggagaggggaggggagggagggaggaaggggaagggaagggaaggaaggaagggaagcgaaggaaggaagggaagggaaggaagaaggaaggaagagagagaggaaagaaggaagaaagaaagagaggggagggagagaaaaggagagaggaaggaagggagggagggaaggaaagaaggaagggagggaaggagggaaggaagggaggaaacaagggagggagggagggaaagcgggagagagagagagagaaagaaaagaaaagaagaaggaaggaaggaaggaagaaaggaaggaaggaaggaaaatctaagagaatagaaactcaggataatgattttggttttggggtttttttgtttagctttattttctaaattttctttgagatgaagtcttcctctgtcacccaggctggagtgcagtggcacaatctcggctcattgcaacctccacctcccaggttcaagcaattcttctgtctcagcctctccagtaactgggactacaggttcacgccaccaggcccagctaatttttgtatttttaatagagatgggatttcaccatattggtcaggctggtctcgaactcctgaccgcaggtgatctacccacctcggcctcccaaagtgctgggattacaggcatgagccactgtgcctggccatttttttttttttttttttttgagacagagtcttgctctgtcacccaggctggggtgcaatggcacgatctcagctcacaacaacctctgcctcccaggttcaagcaattctcctgcctcagcctctcaagtaactgggactacaggcgcatgccaccacgcctagctaatttttgtatttttagtagaggcagggtttcaccatgttggccaggttggtcttgaactcctgacctcaaatgatccgctcccctctgcttcccaaagtgctgggattacaggcatgaaccactgcgccgggcctttttttttttttttttttttagatgtagtttcgctcttgttgcccaggctggagtgcaacggtgcgatctcagatcactgcaccctccacctcctgggttcaagtgatttttctgcatcacactcccgagtagctgggattacaggcatgggccaccatgcccagctaattttgtatttttagtagacacggggtttcgccatgttggtcaggctgatcttgaattcctgacctcaggtgatccacccgccttggccttccatagtgctgggatcacaggcgtgagccaccatgcccggcccatattttctaaattttctaccgtaaacctttgtacctaataagaggcactttgctaggtactgagagtgcagtgttgagcacatattaattatcttgtttcttcaatagtgcattcgtttttgtattttattatttctgtcctacttcatttatggttttattcttttccttccttccttccttcctccctccctccctctttctgtctgtctgtctgtctttctttctttctttttactgttattttatggtttttttttgagacggagtttcgctcttattgcccaggctggagtacaatggtgcaatctcggctcacctcaaccttcgcctcccgggtttaagcgattctcctgcctcagcgtcccaagtagctgggatcacaggcacacgccaccacgcctggctaattttgtatttttagtacagacagggtttccccatgttggtcaggctggtctcgaactcccgacctcaggtgatcgcccacctcagcctcccaaagtgctgggattacaggtgtgagccatcgcacccagcctatttatttattatttatttttattttttgagacagagtcttgctctgtcacccaggctggagtgcagtggagcgatctcggctcaccacaacctccacctcctgggttcaagcaattctcctgtctcagtctcctgagtagctgggactataggggcccgccacttcgcccggctaatttttgtatttttagtagagactgggtttcgccatgtttggccaggccagtctcgaacttctggcctcaagtgatccacccggcttggcctcccaaagtgctgggattacaggcgggagtcaccgcacccagcctgttcttctttaaatctctttaacttgaaaggttagctttgttttcattttcaatctttaaaaaaaaaatactttaatactattaattttccttgaagtgtttctttagctacacatgataagttttgatatgtagttctcctattgtcatttaattataagtaatttatagactccattgtgagttcccctttaatctttgagggtataatttacagttacaaacatgtgtcgatcttcattatttgtagttctatatttatgaatgcacctactcactaaaattcatttgtaactccaaagtcagtgctcgaagtgcttttgtagtcattcgtggacactcgcagaggggtgaaacatgagtcactggatgcacatatgcatgttcccagctgtttcagctctcctactgtaaaaaaatacctttttgtgtatatttaatgccccatttttctcatttttgtggtttttgttgattttgctgtttaaaatagcctctaaggatgatgctgagtgctgtcttgcattcctaagcacaagaggctgtaatgtgccttatgtgggtttgatcacaagcatgagttacagtgccattggccatgagttcagtgctaatgaatcaacaacatgtatttcatatggagtttttaaacagaaatatacacaaaacaaggttatatattgactgattgatgaaaatattgtggccaaaggcttggaggaacccaaccctgtatttccactagaaacaatggttcagtattcactaattcagtgttttcagtgactttgtagaactaccacaaatgagaatggcatggctgtgtgtgtatatgtggtctttttttttttttctgagacagagtttcactcttggtgcccatgctggagtgcaatggtgcgatcttggctcactgcaacctccacctcccaggttcaaacgattctcctgcctcagcctcccaggtagctgggattacaggcaggtgccaccacgcctggctaattttgtattttttagtagagacgaagtttcaccatgttggtcaggctggtctcgaactcctgacctcaggtgatcctcccacctcaacctcccaaagtggtgagattacgggtgtgggccactgtgccctgccgtgtatggggcctttttattgttaatttataatttaattactttgtggtcagtgaatggttttcgtaacactgatcttttttttttttttttttttgagacagagtctcgctctgttgcccaggctggagtgtagtggtaagatctcagctcactgaaacctctgcctcctgggttcaagtgattctcctgcctcagcctcctgcgtagctgggattacagacaggccggcaccaccaagcctggctaattgttttgtattttcagtagagatggggtttcactatgttggccaggctggtcttgaactcctgacctggtgatctgcacaactcagcctcccaaagtgataggattacaaacatgagacaccgtgccctgcccaaagctgatatatttgttagcagattatttctcttatttatttatttatttattttgagacagagttttgctcttgttgcccaggctggagtgcgatgatgcgatcttggctcactgcaacctctgcctcctgggttcaagcgagtcccctgcctcagcctcctgagtagctggggttacaggcgtgcaccaccatgcccagctaattttggatttttttttttttagtagagatagggtttcaccatgttggtcaggctggtctcaaactcctgacctcaagtgatccacctgcctcgggctcccaaggtgctgaggttacaggcatgagccattgcgcctagccaattcgtcttattatcttataatgtctctcttttgtaatggttttccctttatcttctattttatatttatttatttatttttttgagacggagtctcgctctgtcaccaggctggagtgcagtggcgatctcggttcactgcaatctccgctaattgcaatctcctctaattgcaatctccgcctcctgggttcaagcaattctcctgcctcagcttcccgagtagctgggattacaggtatgcgccaccacgccggctaattttgtatttttagtagagacagagtttctccatgttggtcaggctggtctcgaactcccgacttcaggtgatccacccacctcagcctcccaaagtgctgggattacaggcgtgagcctccatacctggcaagtcatgtagggtctgacaatgaatataaaaggggttatttacataaaagtttgtgaagatattagcttagagaggcaagttaattatggtacttagagataaacaggcacatccttttatgtatatctagtgaagtcagttgctgtaatctattctgtttaaaaactgaactatactaggtctgaataacaagataatgtacatttcccctagaagataggaacgacaactcacacctgtgtgccattcctttttttcttcttctgatagtgattggacctccccaaacgacctaactcagaggaatttgggcatagtgtactagctttcttcccatgaaacatccctgtttgtgttgtatatttgaggtagtagcaacgtgattaagaatgtggactctaactggccaggcgcggtggctcacgcctgtaatcccagcactttgggaggccgaggtgggcagatcactaggtcaggagatcgagactatcctggctaacacagtgaaaccctgcctctactaaatatacaaaaaattagccaggcatggtggcaggtgcctgtagtcccagctactcggaaggctgaagcaggagaatggcgtgaacccaggaggcagagcttgcagtgagccaagatcgcgccactgcactccagcttggtgcaacaggctcaaaaaaaaaaaaaaaaaaaaaagaatgtggactctagaatcaatcagttggctctgggttaaaatctcagccagctctactacctactagctgtttgagactgacgagtttcctcatctatttattttttaaaaaacagtaataacagtacttgattcacagggttgttaacattgagatgatgcatgtggactgttctgccagttttctggtatcccatggtgagtgctgtagctacggtgagcattgtgtgttataatcacaggtagtaggagatgggaaagcaggggccatgacaggaggccaatccagagaggttcgtgggttacaggaagaagacagataaggctatagcatgaagcatattagttcgaggaaggatttaaggtgcggaggccagatctgaaagtaatgaaacaactccagtgcaactgtttcataactggttctctttgattcttctagaaagccatgtcctgccaccgcagccagctcctctggttccgccgcctctacattatcttctcccggtacatgagaatcaactcactgagcttcctctgaagccttgaagggttttcaggtccaaggaacaaaggggaaaatagacaaaggagtgcagaggacctggcctggcactggcttatttacctgagctcaaggagatccccgctggagcagcctctgcaaaagggagcccatgtaggccaggggctgtccaaactccagcttcttcccctgggaaaaaacccaaagaaccaaaaacaaaccaccccaaggataataatagctacactgctagcttctcaagttcttgtgaaaaacaatttacataatgacacagtagatgtggaacacctagcccagtgcctgggcaggtccctattatcataaatgaacataaaagtgctctaaaaccactcccacagatgtgacttttacattgtttccaaagcaggttcaccaaaaacacatacacaaaatgcaacagtgtgtgttgaattggttcaatcataattcctttgatttttcttgtatcagaatgtgggtctaggaaaaacttgctctatttaacaggacagctctgattgaagcatccaagtacaggtcactggggtgggcactgttttatacagagacgattacaagaactctgcctcaaagagcttacaatcaaatatgtcagctctcagtctttttggagaagtaggaagtaggaagataaatctgagacttaaaaaaacacaaaacattcaagaacctgatgtcttaaaattgtcctacgaacaaaagctctctgaaagctctggcttggaaactactctcagaatccagctaacgctccagggaagtggcctgagtcagggaagctaagtggtgaagagcacaggctggtagtcctgcgattgaagccagaatgaccagctgtgtaaccaaaggcaaggtgctgaacctttctctgcctcaattctctcatctgcaaaatgggaaataataatgatcccaacctcagagaactgaacaagataatacatgaaggtgcatatcaaagagtctcacatgctctgctgggtaagtatgccctccacccgccacaggaaacactgaattgcttctccatagctgcaggttagagacctgcttgttcagacactccacctcaacttgccctcctttgcttagtgtcaccattatcttgaatgcctcctaggggccacataagactaatagagctattaggctctgaagccggaatcaaaaatgcaaatctggttatgtgatttgtctacttaaactttgtcaatagctcctaatagccttcatgtgaaaatgtgaccagaaacacgttactaacactggctagagtgcagtaggagagtgtggtaggacaggctgacctctgccctgttactaggaagacagacactcacccagcctttctgaacagcaactctgctaagagcttttaaaatatgcatattctatgacctaaggaatacttagaaaatcaaaattatatacacactggctgggcgcagtggttcacatctgtaatcccagcactttgggaggtcaaggagggtggatcacttgaggccaggagttcgagacaagcctggccaatgtggcaaaaccccgtgtcgactaaaaatacaaaaattagccaggcatggtgccgcaggcctgtggtcccagctactcggaaggctgaggcacaaggattgcttgaacccagaaggcggaggctgcagtgagctgagatcgcgccactgcactccagcctgggcgacagagccctgtctccaaaaaaacaacaacaattatacacacaaagattatcattgtattatttataatagcaaaactggaaaaatccagtgatgcagttgtgttttgtaacaaggaagaacgttcacactattaaatttttaaaagcgggttaggaatagcacaatcccatttttgttgaataaatatatacacaagtatataaataaatacatatatatcaaaagatatatatccaaaagataaatactagctggcaaggtaatctttcaacaatgaacatttataattgtaaaggactttgttgttgttgtttatggatcatttggatgtgagaattttgatatcatgtgaagttttttaaaaagtgtgtttataggcccggccgcggtggctcatgcctgtaatcccagcactttgggaggctgaggcgggcagatcacaagtcaagagatcgagaccatcctggccaacatggtgaaacctcgtgtctactaaaaatacaaaaattagctgggcatgggggcgggcacctgtagtcccagctactcaggcggctgaggtaggcaaattgcttgaacctgggaggcggagattgcagtgagccgagatcgcgccacagcactccagcctgacaacagagcgagactccatctaaaaaaaaaagtgtgtataggccaggtgcagtggctcacacctgtaatcccagcacttcgggaggctgatgcaggaggattacttgagctcaggagtttgaaaccagcctgagcaacatagtaagaccccatcttttcaaaatattttaaaattacccaggcttggtggggtgtatgtatagtcccagctactcaggaggctgaagtgagaagatcacttgtgcccaggaggtcgaggctgcagtgagccatgatcataccactgcactccagcctaggccacagaatgagactgcctcaaaaaaaaaaaaaaaaaaatatatatatatatatatatatatattaatcttagaggttagaaagatgaacaaaattatcaatatttgtttctggatggtgagacttaaaacatttcctgcctcttttgttttactgtacattccaacttttttgaaataattaagtagaagtcggccagtgcggtggctcacgcctataatcccagctacttgggaggctgaggcacaattgcttgaacccgggaggcggaggttgcagtgagtcgagatcacaccactgcactccagccttggcgatagagggagactccatctcaaaaaaataaaataaaataaaaataaataagatttaaaaaataaaaaaaagagggttgctgcatctgagactgcaggttctactctgggttctggaaagaggacagaccagaactaggctctccttggtaccagcagagagccaagggactgcagcacaggagggaaggaagcccctggaggccagttagggcagccactagcagtgccttcatgagaaaagtaccctccagattcaatgcagccctggggacacttgtcctggcaagaaaagagtgtcctcgtgcaaattatcaacaagtagtctttcctgcctgcaaacacactccctccccagggacagccacaaacagccttgtagaaggagcagagacttaagcatccacttagccagatgctcttgtttggttaacaacctgcaaaactaggcagcagtagccccaaagcctggagcaaaaatcagaatttcatggttccttgaaggaacaccaaaaaaaaaaaaaaaagaagaagagagagaatcctctcctccaactgcccaaatagaaaggatctcagtgaattaagaatcctctgggaggggcagcaatcccacttgctcagagacctggagagtgaccaggctggggtgggtgtgctgaagtcaggagagggtcaccccttgtcagagagacctgcaaacaatcccccacccaccccatcctcggcaagggctgatggtttgccagttctcacctcggtccagagagcagaaactgccaacttcaaccactccccgcttggctactactcagcagccctgactcattaagaaaacacaaaaatcgagagcaaccagacacaatacaaaaggggaaccctcacctgaggaggctcagaaggaggggaatagggcagatctcactgaagtagcaattaaatggaagagactttatcagaaacagtagtgaaagcccgggcactgacccagacaaaaaagcacacttctccgtggtgactaaattagtaatgtggaatatcaagtagaagatatattgcagaacaaagaggttaaaaagccaagaaatggaaataagggtgggaaagagatttgaaaacacattaaggagagccaacgtgaataatggaagttccagaaggagcaaaagcaggaaggtaataaaggagaacttccgtaatctgaaggagactgagtacactgaaagagcccgccaaatcctaggcagctttgatttttaaaacagatgcacaaatatgctgcgaaattcctaaattcccagtgagaagggggagattaaagtattcaaaaagtctcctcttggggccagccaccgtggctcacacctgtaatcccagcactttgggaggctgagactggcggatcacttgaggtcaggagttcgagaccagcctggccaacgtggcgaaaccctgtctctactaaaaatacaaaaattagccaggcgtggtggcgcatgcctgtaatcccagctacttgtgaggctgaggcagcagaatcacttgaacccaggaggcagaagttgcagtgagccaagattgtgtcattgcactccagtctgggctacagagtgagactctgtttcaaaaaaaaaaaaaaaaaaaaccaggccgggcgtggtggctcatgcctgtaatcccagcactttgggaggccgaggcgggtggatcatgaagtgaagagatcaagaccatcctggttggccgggcgcggtggctcacgcctgtaatcccagcactttgggaggccgaggcgggcggatcacgaggtcaggagatcgagaccatcctggctaacacggtgaaaccccgtctctactaaaaatacaaaaaattagccgggcgaggtggcgggcgcctgtagtcccagctactcgggaggctgaggcaggagaatggcgtgaaccccagggggcggagcctgcagtgagccgagattgcgccactgcactccagcctgggcgacagcgagactccgtctcaaaaaaaaaaaaaaaaaaaaaaaagaccatcctggccaacatggtgaaaccccgtctctactaaaaatacaaaaattagctgggcatggtggtgcgcgcctgtactcccagctactcgggaggctgaggcatgagaatcgcttgaacccaggagacagaggttgcagtgagccgagattgtgccactgcactccagcctggcaacagagcgagacttcatcaaaaaaaaaaaaaacaaaggtgtcctttgcggccaaggggaagctgggctgggggtaaagctgcatggtgcagggtgacaaatagacaactgatgggctgcagtctggattgtgaggaactgaaaggtatacagttccagggctgaaactaaaaagcatgggatctcaattaacaaagaggaaagcaggaaatgaagaaaaacttaaaagactgcaaaagtaagaaaaaaggaaaatagtataaaatgtaataaatataatagaagtaatacaaaaagaataaaatcagagctacttcaaaaaatatgaacaggctgaatttccagaccaaaacagactgtgaaatcaatgtgttagaaaacaaaatctagctacatctaaaagtaacaaaggctaaaaataaaaggatgaaccatataccatgtagcaggagaacaaaaagaaggaagagcaacaccagaaatccaggccaaacccaatatgacaccaagaagcattaaattggacaaagatgggtatgttaacaggttcactccatgagatgacaggcacccaacatcacagtagccagatacataaaacaaaacctcccagacatacaagacctttattaaaagacaaaaacaaacaagacaccacgataatagtaggaggcctcagtattcttccagaattttgaaaaattgagttggcaaaaaataacatcaaatattggaataaagcaaacattcacttatgtgatagaatgtttacaaaagttgactgtttattggccactgataaatccatttatttatttatttatttgagaccaggtcttgttctgtcacccaggcttggaatgcagtggtgtgataacagctcaccgcagcctcaaattcctgggctcaaggaaccctctgcttcagcctcccaagtagctgggactacaggcatgtgccaccacccccggttttttgtgggttttgtttgtttgtttgtttgaaatggagtctcactctgttgcacaggctggagtgcagtggtatgatcttgactcactgtccgccttccgggttcaagcgattctcctgcctcagcctcccgagtagctgggattacagatgtgcgccaccacgcccagctaatttttgtattttcagtagagacaggattttagcatgttggccaggctggtctcaaactcctgtcctcaggtgatctgcctgcctcggcctccgaaagtgctgggattacaggcgtaagccaccacatcctgccgttctttttgttgttgtttgtttgtttgtttgttttaatgagacgaggtgtcgctatgttgaccactttggcctcccaaaacattgggactgcaggcataagccactgcacccagcagagaaatccctaataaattccctactgtagagatttaataggccacattcttggatcataattaaataacatgcaagtaaataataaaattactaaagagggggataaacaacacaactcagaaatcaagaagccccttcctaaataacccctagatcaaagaggaaatcaaaattggtattatgaattatctagaaagtaatacaaattaacacttgatgtgggatctgtatttaggtaatttgtagtcttaaatgcttaattttttaaaagattgaaaataagtgaactacatgattcaatttgagaaaatcaaaaatagaaaccaatagcaagagggacttaatagagatataagattagattaaataagtgaaaccaaaaaatagtggaaagaataagttttctttgaaaaatgaaataagccaatatactgcaagtctaattcaggaaaaaagaaaacaaaagtgcagttattgggaacagatggatatataaccacaaaagtgaaaaaggctgaaaaaaattataaaatattatatggcttgaggtcaggagttcgagaccagcctaggcaatatagtgaactaaaaatacaaaaattgcccagggaggttgaggtgagaggatggcttgagcctgggaggcagaggttgcattttgccattgcactccagcctgggtgacagaaccagaccctgtctcaaaaaaataataaaaaataagtgttggtgaggatgtaaagaaattggaaccctcatacattgttggtgggaatgtaaatgatgcagctgctatggaaaacagtttgatgttttcttagtaattttaacaaggatttaccacatgacccagcagctccactcctaggtacatttcccatagaatggaaaacattcagacaaaaccttgtaaatgagtattcatagcaatattattcataatagcctcaaagtagaaacaactcaaatgtctatcaactggtgaataaacaaaatgcggcattttattattcagccataaaaaggaacaaagtcctggccgggcacagtggctcatgcctgtaattccaacaccttgggaggccaacgcgggcggatcacaagatcaggagttcaagaccagcctggccaatatggtgaaaccccctctctactaaaaatagaaaaaaattagctgggcgtggtggcacatgcctgtaatcccagctacttgggaggttgaggcaggagaattgcttgaacctgggaggcggaggttgcagttaactgagattgcaccattgtactccagcctgggcaacagagtgagactcagtcacaaaaaaaaaaaaaaaaaaaaaaaggaacaaagtattgatgcatgctacaaggcaaatgaacttcaacagcattatgctaagtgagagaagccagacacaaaaggtcacctatgtaggattccacttccgtgaaacatttaaaataggcacattttgagatggaaagcagattagtagttgccagaggctagaggaagtggggagtgggcagtggctgctaatggtacagggtttctttcttttttaaaaacaattttatatattaaaaatattttaacatagggtcctgccttgtcacccaggctggagtatggtggtgtgatcatagttcactgtaacctagaactcctaggctcaaatgatcctcctgtctcagcctcccaagtagccaggactacagggtgtgccatcacacctggctaattttgttttttaagagactgggtttcactatgttggtcatgaactcaaaaacactgaatactaaagtatactaacactgaattgtacacgttaaagggttgaattttatgttattcaaactgtatctcaattcaaaaattcacgtgaaaataagattgcattaaaatattctagttcactataaaagatatacacaagctaaatttgatgatcacgccgggtgcggtggctcacgcctgtaatcccagcactttgggaggctgaggcaggcgtattacgaggtcaggagatcgagaccgtcctggctaacacggtgaaaccccgcctctactaaaaatacaaaaaattagccgggggtggttgcagacgcctgtagtcccagctactcgggaggctgagtcaggagaatggcgtgaacccgggaggcggagcttgcagtgagccgagattgccactgcactccagcctgggagacagagcgagactccgtctcaaaaaaaaaaaaaaaaaaatctgatgatcgctttctgcacctagtgatactcacctaacacactagcccattaaacacaaatactacagaatacaacatttgttgttattttgaacaacttttagtgcttcctgtttttcttttaacagtttttaaaagataaaacgaattaatgcagaacataaaacaagaattgaataaatggagagttgtgccatgttccttgatagagatttaaaaatcctcatacagttcatatataaatttaatactacctatagcatctataaattccaatatagaaatttaaatatttacatatgtatttatatatgtatatttattcacattcttacaatgttaatatataaatttaatgtaattctagtcagaatatcaatggattatctttgggatttgaattaaattattttaaaaatatattagaaaagaaaatgtccaagtattgccaaaatataaacatcaaaaaggatagtgatgtgaggcctgcctttctatatattaaaacttaggccaggtgtggtggctcacgcctgtaatcctagcactttgggaggctgaggcaggcggctcacgaggtcaagagttcgagacagcctggccaacatgatgaaaccacatctctactaagaatacaaaaattagccaggcatggtggcgcgtgcctgtaatcccagctactcgggaggctgaggcaggagactcgcttgaacccgggaggcagaagttgcagtgagcctggtttgcaccactgtgctccagcctgggcaacagagcaagactctgtctcaaaaaaaaaaaacagcaacgatcccatgcaaaaggacgacaaatagcataagacagctaaggataaaccgaaccctacagcgtgctgttcatactgtttccataaagagaacagcataaaacttgaagagtgggaaagaacaaacccattggtgagccatattaccttcctggatgataaagcagtactgtacagaagtctgttctccctgaattaatttataaatgcaatataattgcaaccaaaatccaaacatgctttgattgcatgatacttgactcactaattctaaaattcatctgcaggacacagtgcacaaaaacagaataatatggccaggcacggtggctcacgcctgtaatcccagcactttgggaggcctgaggctgacggatcacctgaggttgggaattcaagaccagcctggccaacatggtgaaaacccgtctctactaaaatataaaaattagctgcgcatggtggacacacctgtaatcccagctactcaggaggccgaggcaggagaatcgcttgaacctgggaggcggaggttgcagtgagccaaggtcgcaccactgcactccagcctgggcggcagagtgagactccttccccaccccccaccccacaaaaaaagtgtaatatggcaggatttaccctattagattgtttaaggcacattataaagcttggggatttaaaataatttgttatttgtggaactacaaaaaaatagatgaaaagaacaaataagagtccttaaaaaccctgattagtatatgtaacattttaaataaatgaagaatggatggattcatcaataaagtgttgagccaccagttatccaatttgaggataccattcacaaaatttagaggaagaaaaaaaaaacccacacacaaatccaggtagatcaaagaactatatgtttaaaaaacaaatagccgggcgtggtggctcacacctgtaatcccagcactttgggaggctgaggtgggtggatcacaaggtcaggagtttgagaccagcctggccagcgtggtgaaaccccgtctctactaaaaatacaaaaaattagccgggcatggtggcatgtgcctgtagtcccacctactcaggaggctgaggcaggagaattgcttgaatccagcaggtggaggttacagtgagctgagatcgcaccactgcactctagactgggtgatagagcgagactccatcttaaacaaacaaacaaaaccaataaacaaacaaaagtcagtaaaagtagtagaagaaaatacacgtaaatatgtttataagcttgggtaaggaagaattttttttttttttttttttgagacagagtcttgttctgtctcctaggctggagtccagtggcttgatcacagctcactgcagccttgaattccttggctcaagctatcatcccacctcagcctcctgcatagctaggactcaggcatgtgccatgctaagctaattttttatttatttttaaaattaattaatttttttttttttggggacagagtttcactcttgttgcccaggctgcagtgcaatggtgcaatcttggctcgccgcaccctctgcctcctgggttcaagcgattctcctgcctcagcctcccaagtagctgtgattacaggtatgcaccaccatgctaggctaattttgtatttttagtagagatggggtttctccgtgttggtcaggctggtctcgaactcccgacctcaagtgatccacccgcctcagcttcccaaagtgctgggattacaggcgtgagccattgcgctgctaagctaattttttttttttttttttgagacggagtctcactctgttgcccaggctggagtgcagtggcaggatctcggctcactgcaagctccacttcctgggttcacgccattctcctgcctcagcttccctaggggatgggactacaggagaccgccaccactcccggctaatttttttgtatttttagtagagacagggtttcgccatgttagccaggatggtctcaatctcctgacttcatgatccgccctcctcggcctcccaaagtgctgggattacaggcatgagcaaccacgcccggccctgctaagctaatttttaaaatttttttgcaaatatgaggtctccctgtgttgcccagtttggtctcaaactcctggcctcaagtggtcttcctcatttggcctcctaaagtgctgggattacaggtgtgagccaccacgcctagtcccagaaagatattctcaaaaaagaaataaatcacagccggctgcggtggctcacgcctgtaatcccagcactttgggaggccaaggcgggcggatcgcaaggtcaggaattcaagaccagcctgaccaacatggtgaaaccctgtttctactaaaaatacaaaaattagctgggcgtggtggcgcacgcctgtaatcacagctactcaggaggctgaggcaggagaatcgtttgaacccgggaggcagaggttgcaatgagccgagatcatgccattgccctccagcctgggcaacagagaccgactccatctcaaaaaaaaaaaaaaaaaaaaaaaagaagaagaagaagaagaaaaaagaaataaataaatcacaaaaaacccagaaaacccaagtcagagagccactaagccaaaagaaaaaaaaaaaaaaaagactaatgaatttgactccatcaaaaattaaaactcagccaggtgtggtggctcatgcctgtaatcccagcactttgagaggccgaggtgggtggatcatgagttcaggagttggagaccagcctggccaacgtagtaaaaccccgtctctaccaaaaatacaaaaaaattagctgggcgtggtggtgggtgcttgtaatcccagctacttgggaggctgaggcaggagaattgcttgaactagggaggcagaggtttcagtgagccaagtcacgccattttactccagcctgggcaacaagagcgaaactccatctcaaaaaaaaaaaaaaaacccaaaaaaacaaatgcatatctttcagctcagcaatcccacttctctattctcaaataatacacatatgtatgtataaagaggtgtgtacaagaatgttcactgtcaacactcttggtaatagcaaaaaactgtaaacaatcataatttccgtgaaaaaaagaatagctaaataaactacacccacactatgctgttctatgcaacagttaataatgaggatatgtatattgatatgaaaagatcaagatgtaattaaataaagaaatgcaaccgaatgcagtggctcccacctataatcccagcacttagggaggccaaggcaggaggctcacttgaggccaggagtttgagagcagcctgggcaacatagcatgaccccatctctacaaaaaattttaaaaaattagccagggggtggcacacacctgtaggctgtggtaggactgcttgaagtaaggagttcaaggttacagtgagctgtgatcacatatccctaaaaaaaataattttttttttaagacggagtcttgctctgtcacccaggctgtagtgcaatggtgcgatcacagctcactgcagcctcaacttcccgggctcaggtgatcctcccacctcagcctcctgagtaactgggactacaggtgagcaccaacacacccagctaattttttttactttttatttacttatttatttatttatttatttattttttgagacggagtcttgctgtcacccaggctggattgcaatggcacacaatcttgacttgctgcaaccaccgcttcccaggttcaagcaattctcttgcctcagcctccttagtagctgggattaaaggtgtacacaaccatgcccggctaatttttgtatttttagtagagatggggtttcgccatgttggccaggctgggctcagactcctgatctcaggtgatccacctgccttggcctcccaaagtgctgggattacaggcatgagctaccgcgcccagcctgattttttgtatttttagtagagacagggttttgccatgttctcccaaagtaccggaattacaggtgtgagccaccgtgcttggcccctgtataattttaaaattaaaaaaaattaaaaatacctggagttctggcctcgaaaatcccatccttgtgcgtgctgcttccagtcttgaagagtgaacctggccatcagtgattctgaagagacagtgaccacatagaacccagcacagcaaactgagaaactgccatttttattgtattttattgtttcctgtagagatgggggggtctcactacattgcccagtctggtcttgaactctagggcttaagcaatcctcctgcctcagccttccatagtgctgtattacaggtgtgagccaccatgcctggcctggccatctgtattttgtttgtttgtttgttttttgtttttgagacagagtctcactctgtcttccaggctggagtgcagtggcatcatctcagcttactgcaacctctgcctcctgggctcaagccattctcctgcctcagcctcctgagtagctgggattacagatgcccaacaccacgcccagctaatttttgtatttttagtagagacgaggtttcaccatgttggccaggctggtcttgaactcctgacctcaggtgatccaccggtcttggcctcccagagtgctgggattacaggtgtgagccaccacactcggcatttttttttaattttttttttttcctcagagacctttgttctgagatctttattccctctccctgttctttttccttgtctagtctacctcacaaatcatttcatgagtaatttccctaaagcaaagagcaaatatttattaagcatttgccattatttgtactcagtatttggtaatggcaggaatgtttgaggaaagctaatatgttagtaatatggagcaatgtgaagttaagaagagagggagatggcaaccaatcagaagactatatgaggccaggctttattcatcctgttcagaggtggtcacagcttcccaatgcctgcaaaataaaggccaaattcctgagcctaatatccaagaccatccagtctatcctcaacatacctttctgatatcttcattacttcttcccattaaaagcctccaattcagccaatttttttttttttttttttttttttttgagatggggtctcgctgtgtctcccagggtggaatgcatgacaccatcatagctcactgcagtctcaaaactcctgggctcatgtggccctcagcttcctaagtagctgcaactacaggtgtgcaccaccacatgcagcttcagcctggcttttgcatgtgtgcgtacctgttcagttacttctcctgtctccttaaaccttgcttcctttattgattgattgattgaatgattgattgagacggagttttgctcttgttgcccaggctggagtgcaatggcacgaactcggctcactgcaacctctgcctcccgggttcaagcaattctgcctcagcctcccgagtagctgggattacaggcgcccgccaccatgcccaactaatttttgtatttttagtagagacagggtttcaccacattggccaggctggtcttgaactccagatctcaggccatccaccagcctcggcctcccaaagtgctgggattacaggcgtgagacaccatgcccagctgaaatcttgcttcctttaaaaataggatcaaagttgttgtttcatgggtacagagtttcagttttgcaaggtgaagagttctggagatggatggcaatgatggctacacaacaatgtgaatgtacttaacactgctgaattgtacacttaaaaatggttaaggccaagtgcagtggctcatgcctgtaatcacaacactttgagaggccgaggcaggaggactgcttgagcccaggagtttgagaccagccggggcaacatggagtgaccttgtctttacaaaaaatattagccggatgtggtggcacacacctgtagtcccagctactccagaagctaagaggggggagatctcaagtctaagtcaaggttacagtgagccatgttcatgtattgcactgcagcctaggtgaccgagcaagacagtctcaaaataactaaagagagagattctgtctctaaataaattaacagtttatggtaaattttatgtgtattttacaactgaaaaagaaattagaagctgatttaactttttaaagatagactcaaatcgtactctcctcaagacttccctgagttctctcctttgaactcttagagctcttattatctttacagctcacatggattgtaaccattcacaattttttttttttttttttttttgagacagagtctttttctgtcagccaggctggagtgcagtggcgcaatcttggctcactgcaacctctgcctcctggattcaagcaattatcctgcctcagcctcctgagtagctgggattacaggcgcccgccaccacgcctggctaatttttgtatttttagtagaaacagagtttcaccatgttggccaggctggtctcaaacacctgatctcaggtgatccacctgccttggcctcccaaagtgctggaattacaggcgtgagccacagtgcccagcctttttttttttttttgtagatggagtctcgctccatcacccaggctggagtgcagtggtgcaatctccactcactgcaacctctgcctcctgggttcgagtgattctcctgcctcagcttcacaagtagctgggactacaggcacatgccaccatgcccagctaatttttgtaattttagtagagacggggtctcaacacattggccaggctggtcttgaactcctgacctcaagtaatccacccgcctcagcctcccaaagtgctgggattacaggtgtgagccaccatgccctgccacaatcttccatttttaataattgtttatcttatgtcttctttccaatttagctacacatttttttcttttttcttattttttttttgagacagtctcattctgccacccaggctggagtgcagtagcacgaacacagctcactgcagccacaacctcctgggctcgatcaaccctccggagtagctggaactacaggcttaagccacaatgcctggtggcaaacatcttgatagtgctgagtatatatctgctattaatcgactggcctcagaagcaaatcacagtacaaaagaaatgataaaccaaagtgactgctttaatgttaaaaatatttattttttttcctaaaagatcacacaaaagttgggaagagaaggatgtcaattagactacatcaaaatctgggcagagggaggacaaagagctgcctaaagaaactggtagctggagcaaactgcagagatcaagatgaccctagtccacggaaccagcagcccaggtcagccacattcaggagcaccaccgaggcacggcagggagagcaaagttgctggccccaatcattcctccttttcagggcaggagaggcagaagctcactctttagacatgttcttgatggtcttgtgctctttcatggccttctcccaatcgctgccattgaattcctcagtgaccatactccgcacagtgccctcatccaggcagtggggggcaattcctacgagaaagtggcacagacaaagggggatcctcagtatgggtgagaccagatggtgtaccggctcctggataagcccccacctgcaggcatcatcacgctacacattagggcttccaaaggatatgccacagcttatggcttcagtgatgagacccacaggctgccagctggctcggaaagcactggctccagcctaccgcttcagccctctgactcactttcctcaactgccagatgggaatcacactccctgagccaggtttggccaaggctagacaacattcaataccaagttgagagtacaacatgcagaaaggcacagcccagagcaatctctgactggcagcctgaagaattcacaggcctttcctgtgtttagatagataactttctttccttttttttcagatggagtttagctcttgttgcccaggctggagtacaatggcgtgatcttgactcactgcaacctctgccttacgggttcaagtgattctcctgcctcagcctcccaagtagctgggaatacaggcgtgcgccaccaagcctggctaattttgcatttttagtaaagatggggtttctccatgttggttaggctggtctcgaactcccgacctcaggtgagccaccatgcctggcctcagatagataactttctaagaattaaatgtcttcccatttgcacaggatttcatacttttcaactctttcctgttctgcaaggtagacaggaaggagtctccatgtgacagatgaggaacaggaggccctgaagcaatgggggagcggtaaggatgacatcctgccctgccctgcctcccccacctcccctgtccgctccccaccaccataaggcaaaagacactgacagtcatagctgctctcgcagctctggaggctgcactgacacaacaagagtcctcagaacatcttccacctctgctttccccttcaattcacactatagttggtatgattctcaacaactgtcagagggttagttttattactccccagacccaagcaggccctgaagcggggcttggagggttccctgcttgtttattattttttaaaaagaacagagatacggttttgctatgtttcccaggctggtctcaaactcctgagctcaagaaatcctcccaccttggcctcccaaagtgctgggatacaggtgtgagccaccgcagccagccagtcctgcctaatttttgaacaaccaaaaagctttcaaatgccattatcaatgctccccaatcttgcctccttcactcccttaacccctgtcattattaaagctgcctcccctggccccacaagcccatctcctcacccctctcctccctacccttcaacaccatccccagcaacaccagctctaccagcaccagtgaataagaatcacaacctggatgggctccaagtccaacttcaccacattcagatatgggattcagaaaagtttcaccggagcccgactcacattctatcatgtggaaagcgctctgctgaggagccctgttcctctaagatacgcatgtgacagggtctagtcagcatcccacctgtccaaataagactttaaatgagagcaccatgggcctctctgtgtccccctgagcttgcagtccatcccctttactcaccgaagcctccggggtttgatcgtggagtatagaagctctgaacgccacatctcttacagaaggtatgctgggctttgtgagtattgaacgtgtaagtcgttatgtgctcagctccctaggtgaaaacagacaaacggtattcttttttacaaagagatttatttatttaattaatttatttatttatttattgagacagagtctcccactgtctctcaggctggagtgcagtggcgcaatcttggctcactgcaacctccacctgcatgggttcaagagattttcctgcctcagcctcccaagtagctgggattataggcgcgtgcccccatgcccagctaattttttgtatttttagtacagacagggtttcaccatgttggccaggttggtctcgaactcctgacctcatgattcacccaccttggcctcccaaagtgctgggattacaggtgtgagccactgcgcctggccccaaagacatttatttttatgtcacttaaaaaatacacctttgtagccgggtgtggtggcaggcgcctgtagtcccagctactcgggaggctgaggcaggagaatggcatgaacctggaaggccgagcttgcagtgagccgagatcatgccacggcactccagcctgggcaacagagcgagactccgtctcaaaaaaaaaaaaaaaaaaaacatctttggccaggcatggtggctcatgcctgtaatcccaacactttgaggccgaggcaggcggattgcttgagcccaggagttcaagaccaacctgggcaacatggcaaaaccctgtttctacaaaaaaatataaaaattagccaggtgcagtggcacacatctgtagtcccagctacctgggaggctgaggtaggagcatcagttgagcctggggaagtagaggctgcagtgggctgagatcgcaccattaaaaaaaaaaatcttgaaataacttaatggcaggagctcttctgtagggctctttgtactaagaggccatttcctatctccagaagagactgggaccttcttgaggacagagacccatctacactatccagagacatgtcagtctggagcgtgacagctcacagcttcccttaggtcaacggcatacagaattcagccttgagccttccctgatacatcacatcagggagggaaagtgcttgcttcccagggcctatgtggagagacagttcacccaagggactggctctccatgtccccaaacagaacggctcaaggtcttaagaaaactgatggctgtgcttaatttatccacaaaggacaaaccaggaaaaaaatatttgccagacgtcatagacaggctaatttccttaatggataatacaaacgggagactggacaaaggacatgaacggacagttcagatagaaagaaaaataaatcactctttagcctatgaaatgctcaccaaaggaacttcaatgagatgtatttcactgtcaggtgggcaaaatcaaagccgttaacatggtattgacaagtatgtagagaaatatgtgctcacatatatcagtcacaggaacaggaattggtacaatttagcaacatctaccaaaattttaaagtgtacatatgctttagcacacaattccatttcttgaaatttattatacagatatattccaaatgtctcaatgacataggtatatagatactatagcactgtttatgaaggctaaagattggaaaaattgaaaatgtccctcaatagaggaccggttaggcattatggacactcataaaatgaaatattctccaacttttgagaagaatgagacagctctacaaaactaacatggaacaattgccaaagttacaaagtaaagcaaggtataggccaggcgcagtggctcacgcctgtaatcccagcactttgggaggccaaggtgggcagatcacttgaggtcaggagttcaagaccagcctggccaacatggtgaaaccctgtctgtactaaaaatgtaaaaattagccagatgtggtggcgggcacctgtagtcccagctactcaggaggctgaagcaggagaatcacttgagcctgggaggcggaggttacagtgagccgagatcacaccactgcactccagcctgggcaacagagtgagactgtctcaaaaaaaaagttaagcaaggtataaaacaacgtacgtggtatgctaccatttctttttttttttttaaggctatatactggtatgtgtggtgtttttgttttgttttgttttgtttttttgagacaagatctcactctgttatccaggctggagtgcagtggtatgacgacagcttactgcagccttgacctcccaggatcaagtgattctcccacctcagcctcccgagtacctgggactataggcatgcaacaccacacctagccgattttttattttttgtagacatgggggtctcgctatgttgtccaggctggtgttgaactcctgggctcaagtgatctgcctgccttggccttccaaagtgctgggactacaggcatgagctactgtgcctggcctgtatgtgcttttatatgcatatgtatctttgaagagggatccaagaaacagtggcttacctttagggagagaaatcagacagctgaaggggaaggggtggaggtttcttatccttgttaaccctctttacgcttccccagccataccgtccagaattgtgcttcctatagaaatagctccctgaggagccttgctcactccatagccactgcagcacagaaaagcagcgaaggactgccaagtggtcccaagccatccagcattatctggatggaattaaagccccgcccaaccccacattacccataatgtgctaaaagtcttttttaaaaaatctgtattctttaacctggagattttctttctctcttttttttttaactgctccttgtagagcagggtgtaggaagtgtgcccagaatagccagagaacttatttctaagagaattgatcctaaagaagaaatttctaaattgtcaaaaatgtataccaaggaggttcaccagtgttgttgataatcagaaaaaaacgggactcaactgcaatgatgcagagacagtgatggggtaagtagaccaggaaatcggctgtggggaagagggagactggggcatggggacagtagggaaagatttttcactgtgtatatacacattttcttctacctttcaaattttgtaccaagtacaaaaaattccccaaaataataaaattaaagttacaaataagtatataagcttttcattgggaaatgagataagcagtttatcaacaaaaagaatggtaaaattctacttaataaacataagacaataggtttagatgtatttctcagagtagaaaataatacacaaagacagacaccaaaatattaacagtggttacctttagttgacaggatttgggtgattttattgttttttgattctctgaatttgaaaatgtttccacaataccaaataggcctccaaaaaataaaggtaaaaaataacacaaccttttattttttattttcattttttttgagatggagtttcactcttgtcacccaggctggagtgcaatggtgtgatctcggctcactgcaacctccacctcccaggttcaagtgattctcctgccttggcctcccaagtagctgggattacaggcatgcactacaacgcccagctaatttttgtatttttagtagagatagggtttcaccatgttggccaggctggtcctcaactcctgacttcaggtgatccatccatcttggcctcccaaagtgctgggattacaggcgtgagccactgtgccgggcccaccttttaaatgtcaacctgaaaccaaagcccgtgagaggccctgctatgctccaggcccctcccatgctacagacggcatgct

SEQ ID NO: 519 - DNA, 89 bp, Homo sapiens
ttttttttttttttgagacagagtctcgctctgtcacccaggctggtgtgcagtggcgtgatctcagctcactgcagcctccgcctcct

SEQ ID NO: 520 - DNA, 383 bp, Homo sapiens
ttttttttttttgcgacagagtctcgctctgtcacccaggctggtgtgcagtggcgtgatctcagctcactgcagcctccgcctcctgcctcagcctcctgagtagctgggaactactggtgcatgccaccacgcccggttaatttttgtatttttattagagacggagtttcaccatattggccaggctggtgccgaactcctgacctcgtgatccgcttgcctcggcctcccaaagtgctgggtttacaggcgtgagccaccgcgcccggctcctttttcaggtttttctacctctcaggctctgccaggcagtcagttccatgaatttgtcaattgtctctcaacttctcttgtttaacccctgctcccaagagtctctg

SEQ ID NO: 521 - DNA, 291 bp, Homo sapiens
cacaacaaattctaacccattttatcccgacaatgtctgctttggatgcggctggcatgatgaccctgtggagcatcctcatgtcatgcccagtgaacagaggcatgttgtggtctggaggtcaggaatgatgtctgggctgaccatgggtatttgagaatcatccaactccagtgggtattttaggttgggtctgtgtgcatgtgactcgtatgtgtatgtgagtcctggtcttataatgaatgagtggagcaaatctactcatggctcaatacccaactcaagtttccc

SEQ ID NO: 522 - DNA, 329 bp, Homo sapiens
gtagaaattactaaaaatgattttttgactaaagtctccaatctgccaggcactgtgccagcagtttggagaagagcaaggcatcttggccccagaggacttcaaagagagtgggagaggctggtggctatttatagtccttttggtcacttttagagggccttagtaagacaagggcgtgagccattctgtgggaggcagaaggtgaccttgatcttattggcaagcaggagttttccctctaaaggggaggcagggcatttgagagagagaacagcaagtgcaatgataagtagctcagcttgtgaaaaagcaaagcaactattaac

SEQ ID NO: 523 - DNA, 350 bp, Homo sapiens
ctggacctgtctttccctactctagcccttgtgatgggcacaggcaactggggcacacagcacctgccgtggagcagttcagggtgttgtgaggaatctgaatggaaagtaatgaaacaagtgtctttgcctcctctgtagttatgtgcggtcttacactattttacatggtcactatcagcttagttgtttgtcacttgttggtgactgctgtaaggtagatttgagatgtccagggactgcagagctgcctgggatatgactggcattgacacacttgcttgatctcacagcagttgccatggcaggtcaggttgcatccccacccatcccagtgacgaaggcatggg

SEQ ID NO: 524 - DNA, 316 bp, Homo sapiens
ctctcttgctcctctcacaggctcttttctgagtaacaccaagtacttgggaacaaaattacacattgctctctgtttatttatggttatatttatcttggcaatcgacctgttaagctagttttaactttcttatgggtaacagtcacatgttttaaaaggaacctgatggttccagaatccttgttactactaccttttttttttttttttttttttggagacagaatctctgtcacccaggctggagcgcagtggcacaatctcggctcactgcaacctctgactcccgagttcaagcaattctcctgcctca

SEQ ID NO: 525 - DNA, 504 bp, Homo sapiens
gaagtcttggctttgctctgagcccaactgcaataatataataatactgtcatggcttgtattagaatcctaagttcaccctcttctaagctgaaagtagccatatcaaaattagcctgtagtgttagaagagtcaggcaggaagtacacaactactattcactttttccattgacagacataaagttgaatttatatattttttgttgtatcaaaaaagtgcccttgcctctgcatcactgggcatggagtcttcttaagcattaagagttcacatttgatgtttgtagaagtgttgcatgaaatccctgctatctttcttcctgcagaacagccaaatttgatatgaatgaccatcaaaatcagaaggctaggcatcgtggctcatacctgtaaacccagccctttggaaagctgaggaaggaggattgctggagcccaggaatttgagattaacctgggcaacatgacaaaactccatctcttccaaaaaaaaaaaaaaaa

SEQ ID NO: 526 - DNA, 252 bp, Homo sapiens
gaagtcttggctttgctctgagcccaactgcaataatataataatactgtcatggcttgtattagaatcctaagttcaccctcttttaagctgaaagtagccatatcaaaattagcctgtagtgttagaagagtcaggcagaagtacacaactactattcactttttccattgacagacataaagttgaatttatatattttttgttgtatcaaaaaagtgcccttgctctgcatcctgggcatggattctt

SEQ ID NO: 527 - DNA, 8923 bp, Homo sapiens
cctttttatggctgcatagtattccatggtgtatatgtaccacattttctttatccagtctatcactgatgggcatttgggttggttacaagtctttgctattgtgaatagtgctgtaataaacatacatgtgcatgtgtctttatagtagaatgatttataattctttgggtgtatacccagtaatgggattgctgggtcaaatggtatatctgattctagatccttgaagaatggccacactgtcctccacaatggttgaacaaatttacactcccacgaacagtgtaaaagggttcctatttctccacatcttctccagtatctgttgtttcctgactttttaatgatctccattctaactggtgtgaaatggtatctcattgtggttttgatttgcatttctctaatgaccagtgatgattagctttttttcatatgtttgttggctgcataaatgtcttcttttgaaaagtgtctgttcatttcctttgcccactttttgatggggttgttgaaaaccaaacaccacatgttctcattcatgttgaacaatgagaacacgtggacacagggaggggaacatcacacactgggcttatcgtggggtggggggctaggggagggatagcattaggagaaatgcctaatgtagatgatgggttgatgggtgcagcaagccaccatggcatgtgtatacctatgtaacaaacctgcacattctgcacatgtatcccagaacttaaagttttgtttttttttttaagtagtttgggttagccagaggctcttctccactttaaggttataaagaaatgtagttagagtcaaaaattagtagaaagggaggatgagaagtgaacaggacaaatggttgcatgctttatgttctagggctccttggccttttcccagctgggtgaacatctgcagcagcatggtcaggaaatttgtcttagtcttggaaatctcaaaggatgcagcccagcctctgtgcgggtgatccatattttaattagctgggattgtttccagtgtctccctggggaatctcctcccttttaataaggctagcttagcataaataggatccatctgagaatgaaccagaagtcttggctttgctctgagcccaactgcaataatataataatactgtcatggcttgtattagaatcctaagttcaccctcttctaagctgaaagtagccatatcaaaattagcctgtagtgttagaagagtcaggcaggaagtacacaactactattcactttttccattgacagacataaagttgaatttatatattttttgttgtatcaaaaaagtgcccttgcctctgcatcactgggcatggagtcttcttaagcattaagagttcacatttgatgtttgtagaagtgttgcatgaaatccctgctatctttcttcctgcagaacagccaaatttgatatgaatgaccatcaaaatcagaaggctaggcatcgtggctcatacctgtaaacccagccctttggaaagctgaggaaggaggattgctggagcccaggaatttgagattaacctgggcaacatgacaaaactccatctcttccaaaaaaaaaaaaaaaaggcaaaaattagcttgttgtggtggcatgcacctgtagtcccagctacctgagaggctgagaggtgggaggatcgctggagtccaggaggtcgaggctacagtgagccatgatcgcgccactgggttcccacctgggtgacagagagagaccctgtctctaaataaataaataataaaataaaatcagaagcagtaatctggcagtttttaaacctagtccagctcaaagatgggctcagtggccagctcagtcaaatgtaactagttgccaacatttaaacactgggacatctcacataagaagacagatttctaacttctaaaatttgcagagtgtggcaacccttggcccacatttctacatgacaatatctggctggggaagagaaactggaacttcctcatcagatgaatcctgtacactttcatacaccacagttccccatctggctgctttggatgtttataccacccaccttatgctttcggcaccggatctcaggatataagcattagtttcctgagtagacagcatgaggcgcctgcgcaggttagatctacgttaaatcccagatcctctcttttccaaagatggaatgtgtacaaatctccaagcctccatgagctttggcatttgcatctattaataatgcaggtttcttcccaagtttgttgtgagctttaaataaaataccattcatgtagagcccaaatttatgtcctcctcatattaaatgctcagtgaatatttatgacaccttcctggtgtcataattttttttctggctatttatattgaagtgagagtatttgctgctgttaactttgaaaatttgctttggaactactacctcaaagtaatcaccactttcaatgataaaacactatggtcatccttgaaaaccattgctgttctttcctttcctagatcctgtagacttctgagaacttgttatatatcaccttataactttcatgtccactgaaagttgcaatttggctttgatttggattccgctgaagtttgattactgcacactaaaaaattgccctgaaatgaaaatgagaagaatcaagtaataattgttctaagtgcaattgaaacattgtatctcctagtcattctctctgagccttagtttccccagccatgaaattgggatgacagtgttttacaaagtagtaaatagagtaatgctagctccaatagggcataaatcccaaaatgaccgtgctcaacactatagaaagttattgatcgatcctgttagagtggtgagtgtttgaagacagagcagggctgctcttcttcatgcagtggctgatgccatcttacaacacatcttaaaaagttaaaaatccattcctagttcctaaagggaaacagacaatggagaaaaattatgtgagaaattattatgggtcaagtttggaagagttgcactttatttcactcatacttaactgcaaaaaagtgggcagtatagtccctctctatggacaggggagtacaaacacatggaggatggatagttgtctctgccacaacaagcaatgctgtgagagttgaaactccaccatacctgcttcctggaggctttcagcaagtggtggctactcttgctttgctgctattgcaatggtgttattgtcattattaggccttaaagtgccgtgaatgactcagtctttctaacaggaaaattgaaattaaattcgatagccagtggcctggaatttgaggttctctaagagtggaaagggtaaagtattggacatgacatccttatttatctgaggaccacacttgtcaaaataaagtcctatgttttttcccacattataaagttgtctttattgtctaccatcatctttcccagctcttatgtgttataattttaattgcctatgcagtttagagttcaagataaaagccagaatgtgaaaatgatctttatgtcactaatatactggtaaatcacacttcttttgttcataaaacttttttctattaaaaatgatttcaactgaaagcagtgaaattgggaaaatcctaatttttctttggaaaatgtctttgcacatcatttcataatgtatttcctcatagcgtggtgagttgggtgcaaagggagtgcgtttaaggctggtaagtcaagtttgaaagtgctataaatgcattgacatgatacaaatatgtttatttctaaattaaattcagtttaagaatataatttaattttataggttcctgtgaatttcacttaacgagcacatatcaataagctgctgtggcaggagctgatgagacaagaaaaaggtacattccctgtatatacaatcttagagaagtaaactttcaaaaacaaccagagtgacaaatggcccccaaaaaagagacctgtgacactgtaggcaagacgttactctatcttgggttgactgggatatatcaggaaaggcttcttgttgctaaagaaaaggcaagtaaaagtggcccagaaaggaaagaaagaatattttaatcagaggaagcagcatataacaaaggtattacgggaagaagaaaaaagcctaaagcaaagaagatgaaattttctttttttttttttattgcactttaagttctagggtacatgtgcacaacgtgcaggtttgttacatatgtatacatgtgccatgttggtgtgctgcacccactaactcatcatttatattaggtatatctcttaatgctatccctcccctctcccccaaccccacgacaggccccagtgtgtgatgttccccttcctgtgtccaagcattctcattgtacaattcccacctatgagtgagaaaatgcggtgtttggtttttcgtccttgtgatagtttgctgagaatgatggtttgcagcttcatccatgtccctacaaaggacacgaactcatccttttttatggctgcatagtattccatggtgtatatgtgccgcattttcttaatacagtccatcattgttggacatttgggttggttccaagtctttactattgtgaatagtgccgcaataaacatacatgtgcatgtgtctttatagcagcatgacttataatcctttgggtatatacccagtaatgggatggctgggtcaaatggtatttctagttctagatccttgaggaatcaccacactgtcttccacaatggttgaactagtttacagtcccaccaacagtgtaaaagtgttcctatttctccacatcctctccagcacctgttgtttcctgactttttaatgattgccattctaactggtgtgagatggtatctcactgtggttttgatttgcatttctctgatgaccagtgatgatgagcattttttcatgtgtctgtcgactgcataaatgtcttcttttgagaagtgtctgttcatatccttcgcccactttttgatggggttgtttttttctcgtaaatttgtttgatttcattgtagattctggatattagccctttgtcagatgagcagatcacaaaaattttctcccattctgtaggttgcctgttcactctgatggtagtttcttttgctgtgcagaagctccttagtttaattagatcccatttgtcatttttggcttttgttgccattgcttttggtgttttagacatgaagttcttgcccatgcctatgtcctgaatggtattgactaagttttcttctagggtttttatggttttaggtctaacgtttaagtctttaatccatattgaattaatttttgtataaggtgtaaggtagggatccagtttcagctttctgtatatgggtagccagttttcccagtaccatttattaaataggcaatcctttccccatttcttgtttttgtcaggtttgtcaaagatcagatggttgtagatgtgtggtattatttctgagggctgtgttctgttccattggtctatagctctgttttggtaccagtaccatgctgttttggttactgtagccttgtagtatagtttgaagtcaggtagcatgatccctccggctttgttcttttggcttaggattgtcttggcaatgtgggctcttttttggttccatatgaactttaaagtagttttttccaattctgtgaagaaagtctttcgtagcttgatgggaatggcattgaatctataaattaccttggacggtatggccattttcacaatattgattcttcctatccatgagcatggaatgttcttccatttgtttgtgtcctcttttattgagcagtggtttgtagttctccttgaagaggtccttcacatcccttgtaagttggattcctaggtattttattctctttgaagcaattgtgaatgggagttcactcaagatttggctctctgcctgttattggtgtatagcaatgcttgtgatttttgcacattgattttgtatcctgagactttgctgaagttgcttatcagcttaaggagattttgggctgagatgatggggttttctaaatatacaatcatgtcatctgcaaacagggacaatttgacttcctcttttcctaattgaataccctttctttctttctcctgcctgattgccctggctagaacttccaacactatgttgaataggagtggtgagagagggcatccctgtcttgtgccagttttcaaagggaatgcttccagtttttgcccattcattatgatattggctgtgggtttgtcataaatagctcttatcatttggagatacgtcccatcaatacctaatttattgagagtttttagcatgaagggctgttgaattttgtcaaaggccttttctgcatctattgagataatcatgtggtttttgtcgttggttctgtttgtatgttggattacgtttatcgattttcgtatgttgaaccagccttgcatcccagggatgaagcccacttgatcatgttggataagctttttgatgtgttgctggattcagtttgcccgtattctgttgaggatttttgcatcagtgttcatcagggatattggtctaaaattctctttttttgttgtgtctctgctaggctttggtattaggatgatgctggcctcataaaatgagtttgggaggattccctctttttctattgattagaatagtttcagaaggaatggtaccagctcctccttgtacctctggtagaattcggctgtgaatccatctggtcctggactttttttggttggtaggctattaactattgcctcaatttcagacctgttattggtctattcagggattcaacttcttcctggtttagtcttgggagggtgtatgtgtccaggaatttatccgtttcttctagattttctagtttatttgcatagaggtgtttatagtattctctgatggtagtttgtatttctgtgggatcagtggtgatatcccctttatcattttttattgcgtctatttgattcttctctcttttcttctttattagtattgctagcggtcaatcaattttattgatcttttcaaaaaaccagctcctggattcattgatttttttgaagggttttttgtgtctctatttccttcatttctgctctgatcttagttatttcttgccttctgctagcttttgaatgtgtttgctcttgcttctctagttcttttaattgcaatgttagggtgtcaattttagatctttcctgctttcttttatggacatttagtgctataagtttccctctacacactgctttaaatgtgccccagagattctggtatgttgtgtctttgttctcattggcctcaaagaacatctttatttctgccttcattttgttatgtacccaatagtcattcagaagcaggttgttcagtttccatgtagttgagaggttttgagtgagtttcttaatcctgagttctagtttgattgcactgtggtctgagagacagtttgttataatttctgttctttttcatttactgaggactgctttatttccaattatgtggtcaattttggaataagtgtgatgtgatgcttagaattcctggatatccttgttaactttctgtcttgtggatctgtctaatgttgacagtggggtgttaaagtctcccattattattgtgtgggagtctaagtctctttgtaggtctctaaggacttgctttatgaatctgggtgcccctgtattgggtgcatatatatttaggatagttagctcttcttattgaattgattcctttaccattatgtaatggccttctttgtctcttttgatctttgttggtttacagtctgttttatcagagactaggattgcaacccctgcctttgttttccatttgctgggtagatcttcctccatccctttattttgagcctatgtgtgtctctgcatttgagatgcgtctcctgaatacagcacactgatgggtcttgactctttatccaatttgccagtctgtgtcttttaattggagcatttagcccatttacatttaagtttaatattgttatgtgtgaatttgatcctgtcattatgatgttagctggttattttgctcgttagttgatgcagtttcttcctagcatcgatggcctttacagtttggcatgcttttgcagtggctggtactggttgtttctttccatgtttagtgcttccttcaggagctcttgtagggcaggcctggtggtgacagaatctctcagcatttgcttgtctgtaaaggattttatttctccttcacttatgaagcttagtttggctggatatgaaattctgggttgaaaattcttttaagaatgttgaatattggcccccactctctactggcttgtagagtttctgctgagagttctgcttttagtctgatgggcttcccttcgtgggtaacctgacctttctctctggctgcccttaacattttttccttcatttcaactttggtgaatctgacaattatgtgtcttggagttgctcttcttgaggagtatctttgtggcattctctgtatttcctgaatttgaatgttggcctgccttgctaggttggggaagttctcctggataatatcctgcagactgttttccaacttggttccattctgcccgtcactttcaggtacaccaatcagatgtaggtttggtcttttcacatagtcccatatttcttggaggctttgttcatttctttttactcttttttctctaaacttctcgcttcatttcattcatttgatcttccatcactgataccctttcttccagttgatccaattggctactgaaacttgtg

SEQ ID NO: 528 - DNA, 8494 bp, Homo sapiens
ttttttcatatgtttgttggctgcataaatgtcttcttttgaaaagtgtctgttcatttcctttgcccactttttgatggggttgttgaaaaccaaacaccacatgttctcattcatgttgaacaatgagaacacgtggacacagggaggggaacatcacacactgggcttatcgtggggtggggggctaggggagggatagcattaggagaaatgcctaatgtagatgatgggttgatgggtgcagcaagccaccatggcatgtgtatacctatgtaacaaacctgcacattctgcacatgtatcccagaacttaaagttttgtttttttttttaagtagtttgggttagccagaggctcttctccactttaaggttataaagaaatgtagttagagtcaaaaattagtagaaagggaggatgagaagtgaacaggacaaatggttgcatgctttatgttctagggctccttggccttttcccagctgggtgaacatctgcagcagcatggtcaggaaatttgtcttagtcttggaaatctcaaaggatgcagcccagcctctgtgcgggtgatccatattttaattagctgggattgtttccagtgtctccctggggaatctcctcccttttaataaggctagcttagcataaataggatccatctgagaatgaaccagaagtcttggctttgctctgagcccaactgcaataatataataatactgtcatggcttgtattagaatcctaagttcaccctcttctaagctgaaagtagccatatcaaaattagcctgtagtgttagaagagtcaggcaggaagtacacaactactattcactttttccattgacagacataaagttgaatttatatattttttgttgtatcaaaaaagtgcccttgcctctgcatcactgggcatggagtcttcttaagcattaagagttcacatttgatgtttgtagaagtgttgcatgaaatccctgctatctttcttcctgcagaacagccaaatttgatatgaatgaccatcaaaatcagaaggctaggcatcgtggctcatacctgtaaacccagccctttggaaagctgaggaaggaggattgctggagcccaggaatttgagattaacctgggcaacatgacaaaactccatctcttccaaaaaaaaaaaaaaaaggcaaaaattagcttgttgtggtggcatgcacctgtagtcccagctacctgagaggctgagaggtgggaggatcgctggagtccaggaggtcgaggctacagtgagccatgatcgcgccactgggttcccacctgggtgacagagagagaccctgtctctaaataaataaataataaaataaaatcagaagcagtaatctggcagtttttaaacctagtccagctcaaagatgggctcagtggccagctcagtcaaatgtaactagttgccaacatttaaacactgggacatctcacataagaagacagatttctaacttctaaaatttgcagagtgtggcaacccttggcccacatttctacatgacaatatctggctggggaagagaaactggaacttcctcatcagatgaatcctgtacactttcatacaccacagttccccatctggctgctttggatgtttataccacccaccttatgctttcggcaccggatctcaggatataagcattagtttcctgagtagacagcatgaggcgcctgcgcaggttagatctacgttaaatcccagatcctctcttttccaaagatggaatgtgtacaaatctccaagcctccatgagctttggcatttgcatctattaataatgcaggtttcttcccaagtttgttgtgagctttaaataaaataccattcatgtagagcccaaatttatgtcctcctcatattaaatgctcagtgaatatttatgacaccttcctggtgtcataattttttttctggctatttatattgaagtgagagtatttgctgctgttaactttgaaaatttgctttggaactactacctcaaagtaatcaccactttcaatgataaaacactatggtcatccttgaaaaccattgctgttctttcctttcctagatcctgtagacttctgagaacttgttatatatcaccttataactttcatgtccactgaaagttgcaatttggctttgatttggattccgctgaagtttgattactgcacactaaaaaattgccctgaaatgaaaatgagaagaatcaagtaataattgttctaagtgcaattgaaacattgtatctcctagtcattctctctgagccttagtttccccagccatgaaattgggatgacagtgttttacaaagtagtaaatagagtaatgctagctccaatagggcataaatcccaaaatgaccgtgctcaacactatagaaagttattgatcgatcctgttagagtggtgagtgtttgaagacagagcagggctgctcttcttcatgcagtggctgatgccatcttacaacacatcttaaaaagttaaaaatccattcctagttcctaaagggaaacagacaatggagaaaaattatgtgagaaattattatgggtcaagtttggaagagttgcactttatttcactcatacttaactgcaaaaaagtgggcagtatagtccctctctatggacaggggagtacaaacacatggaggatggatagttgtctctgccacaacaagcaatgctgtgagagttgaaactccaccatacctgcttcctggaggctttcagcaagtggtggctactcttgctttgctgctattgcaatggtgttattgtcattattaggccttaaagtgccgtgaatgactcagtctttctaacaggaaaattgaaattaaattcgatagccagtggcctggaatttgaggttctctaagagtggaaagggtaaagtattggacatgacatccttatttatctgaggaccacacttgtcaaaataaagtcctatgttttttcccacattataaagttgtctttattgtctaccatcatctttcccagctcttatgtgttataattttaattgcctatgcagtttagagttcaagataaaagccagaatgtgaaaatgatctttatgtcactaatatactggtaaatcacacttcttttgttcataaaacttttttctattaaaaatgatttcaactgaaagcagtgaaattgggaaaatcctaatttttctttggaaaatgtctttgcacatcatttcataatgtatttcctcatagcgtggtgagttgggtgcaaagggagtgcgtttaaggctggtaagtcaagtttgaaagtgctataaatgcattgacatgatacaaatatgtttatttctaaattaaattcagtttaagaatataatttaattttataggttcctgtgaatttcacttaacgagcacatatcaataagctgctgtggcaggagctgatgagacaagaaaaaggtacattccctgtatatacaatcttagagaagtaaactttcaaaaacaaccagagtgacaaatggcccccaaaaaagagacctgtgacactgtaggcaagacgttactctatcttgggttgactgggatatatcaggaaaggcttcttgttgctaaagaaaaggcaagtaaaagtggcccagaaaggaaagaaagaatattttaatcagaggaagcagcatataacaaaggtattacgggaagaagaaaaaagcctaaagcaaagaagatgaaattttctttttttttttttattgcactttaagttctagggtacatgtgcacaacgtgcaggtttgttacatatgtatacatgtgccatgttggtgtgctgcacccactaactcatcatttatattaggtatatctcttaatgctatccctcccctctcccccaaccccacgacaggccccagtgtgtgatgttccccttcctgtgtccaagcattctcattgtacaattcccacctatgagtgagaaaatgcggtgtttggtttttcgtccttgtgatagtttgctgagaatgatggtttgcagcttcatccatgtccctacaaaggacacgaactcatccttttttatggctgcatagtattccatggtgtatatgtgccgcattttcttaatacagtccatcattgttggacatttgggttggttccaagtctttactattgtgaatagtgccgcaataaacatacatgtgcatgtgtctttatagcagcatgacttataatcctttgggtatatacccagtaatgggatggctgggtcaaatggtatttctagttctagatccttgaggaatcaccacactgtcttccacaatggttgaactagtttacagtcccaccaacagtgtaaaagtgttcctatttctccacatcctctccagcacctgttgtttcctgactttttaatgattgccattctaactggtgtgagatggtatctcactgtggttttgatttgcatttctctgatgaccagtgatgatgagcattttttcatgtgtctgtcgactgcataaatgtcttcttttgagaagtgtctgttcatatccttcgcccactttttgatggggttgtttttttctcgtaaatttgtttgatttcattgtagattctggatattagccctttgtcagatgagcagatcacaaaaattttctcccattctgtaggttgcctgttcactctgatggtagtttcttttgctgtgcagaagctccttagtttaattagatcccatttgtcatttttggcttttgttgccattgcttttggtgttttagacatgaagttcttgcccatgcctatgtcctgaatggtattgactaagttttcttctagggtttttatggttttaggtctaacgtttaagtctttaatccatattgaattaatttttgtataaggtgtaaggtagggatccagtttcagctttctgtatatgggtagccagttttcccagtaccatttattaaataggcaatcctttccccatttcttgtttttgtcaggtttgtcaaagatcagatggttgtagatgtgtggtattatttctgagggctgtgttctgttccattggtctatagctctgttttggtaccagtaccatgctgttttggttactgtagccttgtagtatagtttgaagtcaggtagcatgatccctccggctttgttcttttggcttaggattgtcttggcaatgtgggctcttttttggttccatatgaactttaaagtagttttttccaattctgtgaagaaagtctttcgtagcttgatgggaatggcattgaatctataaattaccttggacggtatggccattttcacaatattgattcttcctatccatgagcatggaatgttcttccatttgtttgtgtcctcttttattgagcagtggtttgtagttctccttgaagaggtccttcacatcccttgtaagttggattcctaggtattttattctctttgaagcaattgtgaatgggagttcactcaagatttggctctctgcctgttattggtgtatagcaatgcttgtgatttttgcacattgattttgtatcctgagactttgctgaagttgcttatcagcttaaggagattttgggctgagatgatggggttttctaaatatacaatcatgtcatctgcaaacagggacaatttgacttcctcttttcctaattgaataccctttctttctttctcctgcctgattgccctggctagaacttccaacactatgttgaataggagtggtgagagagggcatccctgtcttgtgccagttttcaaagggaatgcttccagtttttgcccattcattatgatattggctgtgggtttgtcataaatagctcttatcatttggagatacgtcccatcaatacctaatttattgagagtttttagcatgaagggctgttgaattttgtcaaaggccttttctgcatctattgagataatcatgtggtttttgtcgttggttctgtttgtatgttggattacgtttatcgattttcgtatgttgaaccagccttgcatcccagggatgaagcccacttgatcatgttggataagctttttgatgtgttgctggattcagtttgcccgtattctgttgaggatttttgcatcagtgttcatcagggatattggtctaaaattctctttttttgttgtgtctctgctaggctttggtattaggatgatgctggcctcataaaatgagtttgggaggattccctctttttctattgattagaatagtttcagaaggaatggtaccagctcctccttgtacctctggtagaattcggctgtgaatccatctggtcctggactttttttggttggtaggctattaactattgcctcaatttcagacctgttattggtctattcagggattcaacttcttcctggtttagtcttgggagggtgtatgtgtccaggaatttatccgtttcttctagattttctagtttatttgcatagaggtgtttatagtattctctgatggtagtttgtatttctgtgggatcagtggtgatatcccctttatcattttttattgcgtctatttgattcttctctcttttcttctttattagtattgctagcggtcaatcaattttattgatcttttcaaaaaaccagctcctggattcattgatttttttgaagggttttttgtgtctctatttccttcatttctgctctgatcttagttatttcttgccttctgctagcttttgaatgtgtttgctcttgcttctctagttcttttaattgcaatgttagggtgtcaattttagatctttcctgctttcttttatggacatttagtgctataagtttccctctacacactgctttaaatgtgccccagagattctggtatgttgtgtctttgttctcattggcctcaaagaacatctttatttctgccttcattttgttatgtacccaatagtcattcagaagcaggttgttcagtttccatgtagttgagaggttttgagtgagtttcttaatcctgagttctagtttgattgcactgtggtctgagagacagtttgttataatttctgttctttttcatttactgaggactgctttatttccaattatgtggtcaattttggaataagtgtgatgtgatgcttagaattcctggatatccttgttaactttctgtcttgtggatctgtctaatgttgacagtggggtgttaaagtctcccattattattgtgtgggagtctaagtctctttgtaggtctctaaggacttgctttatgaatctgggtgcccctgtattgggtgcatatatatttaggatagttagctcttcttattgaattgattcctttaccattatgtaatggccttctttgtctcttttgatctttgttggtttacagtctgttttatcagagactaggattgcaacccctgcctttgttttccatttgctgggtagatcttcctccatccctttattttgagcctatgtgtgtctctgcatttgagatgcgtctcctgaatacagcacactgatgggtcttgactctttatccaatttgccagtctgtgtcttttaattggagcatttagcccatttacatttaagtttaatattgttatgtgtgaatttgatcctgtcattatgatgttagctggttattttgctcgttagttgatgcagtttcttcctagcatcgatggcctttacagtttggcatgcttttgcagtggctggtactggttgtttctttccatgtttagtgcttccttcaggagctcttgtagggcaggcctggtggtgacagaatctctcagcatttgcttgtctgtaaaggattttatttctccttcacttatgaagcttagtttggctggatatgaaattctgggttgaaaattcttttaagaatgttgaatattggcccccactctctactggcttgtagagtttctgctgagagttctgcttttagtctgatgggcttcccttcgtgggtaacctgacctttctctctggctgcccttaacattttttccttcatttcaactttggtgaatctgacaattatgtgtcttggagttgctcttcttgaggagtatctttgtggcattctctgtatttcctgaatttgaatgttggcctgccttgctaggttggggaagttctcctggataatatcctgcagactgttttccaacttggttccattctgcccgtcactttcaggtacaccaatcagatgtaggtttggtcttttcacatagtcccatatttcttggaggctttgttcatttctttttactcttttttctctaaacttctcgcttcatttcattcatttgatcttccatcactgataccctttcttccagttgatccaattggctactgaaacttgtg

SEQ ID NO: 529 - DNA, 208 bp, Homo sapiens
gaaatgcctaatgtagatgatgggttgatgggtgcagcaagccaccatggcatgtgtatacctatgtaacaaacctgcacattctgcacatgtatcccagaacttaaagttttgtttttttttttaagtagtttgggttagccagaggctcttctccactttaaggttataaagaaatgtagttagagtcaaaaattagtagaaaggg

SEQ ID NO: 530 - DNA, 1003 bp, Homo sapiens
gaaagaactttaaagttcatatggaaccaaaaaagacctgcattgccaagtcaatcctaagccaaaagaacaaagctggaggcatcacactacctgacttcaaactatactacaaggctacagtaaccaaaacagcatgatactggtaccaaaacagagatatagaccaatggaacagaacagagccctcagaaataatgccgcatatctacaactatctgatctttgacaaacctgagaaaaacaagcaatggggaaaggattccctatttaataaatggtgctgggaaaactggctagccatatgtagaaagctgaaactggatcccttccttacaccttatacaaaaattaattcaagatggattaaagacttacatgttagacctaaaaccataaaaaccctagaagaaaacttaggcaataccattcaggacataggcatgggcaaggacttcatgtctaaaacaccaaaagcaatggcaacaaaagccaaaattgacaaatgggatctaattaaactaaggagcttctgcacagcaaaagaaaccaccatcagagtgaacaggcaacctacagaatgggagaaaatttttgcaacctactcatctgacaaagggctaatatccagaatctacaatgaaccccaacaaatttacgagaaaaaaacaaccccatcaaaaagtgggcgaaggatatgaacagacacttctcaaaagaagacatttatgcagtcgacagacacatgaaaaaatgctcatcatcactggtcatcagagaaatgcaaatcaaaaccacagtgagataccatctcacaccagttagaatggcaatcattaaaaagtcaggaaacaacaggtgctggagaggatgtggagaaataggaacacttttacactgttggtgggactgtaaactagttcaaccattgtggaagacagtgtggtgattcctcaaggatctagaactagaaataccatttgacccagccatcccattactc

SEQ ID NO: 531 - DNA, 338 bp, Homo sapiens
ctgtttttcccccatctttgttgttttatctacttttgctctttgatgattgtgacgtacagatggggttttggtgtggatgtcctttctgtttgttagttttccttctaacagtcaggaccctcagctgcaggtctgttggagtttgctggacgtccactccgaccctgtttgcctgggtatcagcagcagaggctgcagaacagcggatattggtgaacagcaaatgttgctgcctgatcgttcctctggaagcttcatctcagaggggtacctggccatgtgaggtatcagtctgcccctactggggggtgcctcccagttaggctactaggggg

SEQ ID NO: 532 - DNA, 338 bp, Homo sapiens; identical to SEQ ID NO: 531

SEQ ID NO: 533 - DNA, 264 bp, Homo sapiens
tgggcgacagagcgtgactccgtctcaaaaaaaaaaaaagaatttaaatccaggatttcagggttcaatcaaaccacattgccaaaagtccagttacctttgtattaccaatactgcattaagcttcctgggaacatttataaagattttaattctaaggtgactatactcacctttacttgcgaccaccaccacttaaggcaaatgaaggatttcagctgatttatcaaaatcattaatttttattcttacaagcttattttc

SEQ ID NO: 534 - DNA, 264 bp, Homo sapiens; identical to SEQ ID NO: 533

SEQ ID NO: 535 - DNA, 317 bp, Homo sapiens
cattaactttttttttttttttttgagacggagtctcgctctgtcgcccaggctggagtgcgctggcgcgatctgcgctcactgcaagctccgcctcccgggttcatgccattctcctgcctcagcctcctgagtagctgggactacaggcgcccgccaccacacccggctaatttttttgtatttttagtagagacggggtttcactgtgtgagccaggatggtctcgatctcctgacctcgtgatccgcccgcctcggcctcccaaagtgctgggattacaggtgtgagccaccgcgcccggcccattaactctt

SEQ ID NO: 536 - DNA, 243 bp, Homo sapiens
ttttttttttttttttgagacggagtctcgctctgtcgcccaggctggagtgcgctggcgcgatctgcgctcactgcaagctccgcctcccgggttcatgccattctcctgcctcagcctcctgagtagctgggactacaggcgcccgccaccacacccggctcattgtttgtatttttagtagagatggggtttcactgtgttagccaggatggtctcaatctcctgacctcatggtccacc

SEQ ID NO: 537 - DNA, 283 bp, Homo sapiens
tcatcctatattggcattttcttgacaaagtttaccatgccatactttaaaagtttacctttaggtaatagccatttgtctttaactgtagccagtagttacctccagtcaaataatgttccttctgtattagtcaactccattttattattcagaaagtttatttttaaagtactgtgtatatatgggcaaatatataaataatgtatattgtgggctctccaggatctaaaatagcgtcaataaagaaaaaacatcctagaataacagagaagtaaaaaac

SEQ ID NO: 538 - DNA, 374 bp, Homo sapiens
ctcgcctctactaaaaatacaaaaattagccaggcacgcgccaggtggtgcgcacctgtaatcccagctactagggagactgaggcaggagaattgcttgaacctgagaggtagaggttgcacatagcgccactgcgctccagcctgggcaacaagagtgagactctgtctcaaaaaaatatataaataaataaatgaaaaaaaataattgtataacatctatactatagcctcgtaagcattagctacttaatatttttggtatatttaataattttaatacagcatttttgattactagtgaacatgaatattttcccatatttgttaattatactttcctcttacagaaattctgtttgtgtccttcaccc

SEQ ID NO: 539 - DNA, 902 bp, Homo sapiens
gacggttcctccaagacgtctctgtttgtcctcaaaagctccttaattaagtttccccttcaagcctaaattaaacatagctgtcacttggggaaaactcacacatcagggttatatcactgtgggacagtggttattaagaggggtaagggggaacacttaaaaaatcatagcgagggacagaatgcccccagggaaccggtggcgatgtttggagacatatttagttgcaacaacttgtaaggagggtgctattggcatggagaggccagggatgctgctaaacttcgccttacagcaaagaattatctagccccaagtgccagtagtagtacctgtgttgagaaacccccctagatggagatgcagaagaccagacctgggcatggaatgttcttatgctttatgtttacataaatgtgctgtgggctatatcgatttaggctgtaattgcattaaccttccaggtatacctagacacaccagtgattacccttggagggaagcacggttagattggcaaaagaccccaacatttccttctccattctattttgcaacagaaaaagctcagagaaaacagttggagaggcccaaagtaaacaaattgcagtaaacttgaaagcaattatttatgtgtctaattttagcactttatataggagaataaacttagatatatcttgttattagaacaaaataatttagaagattgcatgacagttactaggataatttgctgatttgaatgggacgattaagaagcacattaccggcggagcgcgatggctcacacctgtaatcctagcactttgggagtcagaggcaggcggatcacttgagatgaggagttcgaaaccagtctggccatcatggtgaaaccccgtctctactaaaaatac

SEQ ID NO: 540 - DNA, 577 bp, Homo sapiens
ggaaactcccggcctccgccaccatcttgctttcctttaatccggcagtgaccgtgtgtcagaacaatcttgaatcatgaagctactaaccagagccggctctttctcggtgagctcaggtggcgggtttgggaaagggctggggagcagtgtgtcgacaaggtgatacgaggcggaggtgtctggtctggggtctgggccttgggattcggtctgcccttcagctgaaccctgcgggccaagtgggctgcagactgggtcaggctttggaggcccagctcatgctgtgagcacaagagacctaacaccgggaaacctgaagagaggggcaggacgtgagagcggagttgaagcgagtccttggagagacttctgaaggtcactccggtactcaagtgctggagaaagagaccgtgaaacccagggggagcgggaggacggcgcacttagccccccaccttcactttatccgctgcagcctctgctccttggtttatcacggagcgtcagtttccccagcgaataaaagtataagaaaggagctaatgcagatagaacacttattacagtacctgga

SEQ ID NO: 541 - DNA, 211 bp, Homo sapiens
atagttaggagtgctaaaggagtgatagcaggaagtgatcaattagcatcttctgttcctcttcagtgtgtcttgcacatacagtatttctccatgtcaaaaagtggtttttggtgttggttttgttttgctttttgagacaaggtcttggtctgtcacgcaggctggagtgtaattgtgtgatcacggctcactccatcctcaatctccc

SEQ ID NO: 542 - DNA, 563 bp, Homo sapiens
ccaccatgccctgctaatttttgtattttttgtacagatggggtttcactttgttgcccacgctgacctctaacttctgggctcaagcaatccaaccttctcagtctctcaaagtgttaggactacaagcgtaagctgctatacccggcccaaagtgtattctttaaatctcaaagattcatctacaggtaatgtcatgaatctttccacatcagttttttctaagtgccaaagttctaaggaaaagaattaccataaaatatgtcttcatactgatactgaatgcctgcctcatagtcagtcatctgattttacattactttccagagaatgattccctcataccctgcctttaccaaccatcaccaactctcaagtcttctctttctcccttggagagtacaatgaccttccattatgttatattttatgtacaagttatattttactttaaaattgtttgttacttatatactattttcatctttcaattgatacttctctctcggaaaattgtttgggtatctggccagcctgaataacttctatttatttatttattt

SEQ ID NO: 543 - DNA, 386 bp, Homo sapiens
cgggggcatcgggcgtgtgatgcaaagcaggtcacaatccagcgatcttggtataatagggggacattttttttcacttaagtgcaagccaaatgggtcaagtaatcgcaagctcgtgccctaacactaattgacttatttggggattattataactgtaatatttttcttaatgtcactgttttctgggctgttgattttagcgattgccaagcaatggcattaaatctcttgtaaattttaaattgcacgttatttctgtaaacaagtccctctcttcacatcctggtcattaacctttgccgatttatatcaccatcctctttttttctttctttcacaattactcctgtcttgccgctgaacgccctgctctcagccaggaa

SEQ ID NO: 544 - DNA, 159 bp, Homo sapiens
ccgagcatagtggcgagcacctgtaatcccagctactcaggaggctgaggcaggagaatcgcttgaacccaggaggcggaggttgcagtgagccaagatcactccactgcactgcagcctggacgacagagcgagactccatctcaaaaaaaaaaaaaa

SEQ ID NO: 545 - DNA, 391 bp, Homo sapiens
gggagttggagggctcagcccagggagctccatggcacccacccgcttcgcgcagacagctcggaggcaacgtcacgtgctactttgacctttttttttctccccttttcatttgttttcttttcctttttgttttctctctttttcccctctcccctttctgctctcgggatgcagccaaacgcaaagcatggaaactaaaccgtgttggtagcctgcgaaatatatacagcagcagcaccaacactgaaggtaacgcctccgcacctccacccgcccacacctccacctgcctcttcccctctcatcccctgcccgccccttcctttccaacacaggcatggaaatgcaatttgcccaaagccgcatgctcccttattgtgtttgcaga

SEQ ID NO: 546 - DNA, 359 bp, Homo sapiens
tcattaaaaatcacgatccagctaacatttactaacaccaaaaatgttcacactatatgaagttcatgttcacattgtacaatattcatactacgtatgtagagaaaaactagaaagctatcacctaaatgttcataagataataatcaattaagccaatttaaatattatggatattttaataaaataaaaaatacttaagcggttaaaatggaatataaactgtaaactatatacaaataaatgcaaagaatgatggtaaacaaattcacagtccctagctacgcacaaatcaagcattgatctgagcagcctgggagctcaggtggccaatagaaaaaccaaagggaagcagttat

SEQ ID NO: 547 - DNA, 153 bp, Homo sapiens
agccccccaggttcgcctaatagtcttggctacttccctacagctgctaatcttagcggtgtccctccacagcctggcacggtggtcagaatgcagggcctggcctacaatactggagttaaggaaattcttaacttcttccaaggttaccag

SEQ ID NO: 548 - DNA, 265 bp, Homo sapiens
caggtttttagagttgtcatggtgtatgtacaatatcacagaaatagttgaggttattcagtggagttgtaatgttttacaaatggaaagctaaggacatagtcttggaatcctaaacatttatagggcttttgggcaagagttattcactaaagatgagggggagaagttcttgccacacacatatacaattaatatgtcatggacattttaatgttaataaataatagtacatcattttgtgactacttgtcttataaatttc

SEQ ID NO: 549 - DNA, 280 bp, Homo sapiens
gagtcggagtcttgctttgtcgcccaggccggagtgcagtggcgcgatctcggctcacactgcaagctctgcctcccgggttcatgccattctcctgcctcagcttccctagtagctgggactacaggcgcccaccaccatgcccggctaattttttatatttttagtagaaacagggtttcaccgtgttagccaggatggtctcgatctcctgacctcgtgatccacccgcctcggcctcccaaaagtgctgggattacaggcgtgagccactgcgccc

SEQ ID NO: 550 - DNA, 434 bp, Homo sapiens
ctctctgtctctttttctgtgtgtctctatctctgtatgtgtctctttctcccttccccatcctctcttataatctgtttgttgaggacactgagccatttgctgtgttttgtttcttccatagtctgaatttggttatattcccaaagtgttcttttatccctttatttcctgtaaattgatgtttagatttaaagacttaatcagattcagtcttgatttttcttgatgtggggtggagacaaaagtacttcacagttggtcttaacgtacttacattaagaagcatgtgatgtcttggttttcttcatgtaatatcagcaaccattgaagatcattctcaagattatccattatttcattagaagttgcaaagttgtgataatctaattctgtagttttttcttcagtgattagtggaatacttttaaaaa

SEQ ID NO: 551 - DNA, 434 bp, Homo sapiens
ctctctgtctctttttctctgtgtctctatctctgtatgtgtctctttctcccttccccatcctctcttataatctgtttgttgaggacactgagccatttgctgtgttttgtttcttccatagtctgaatttggttatattcccaaagtgttcttttatccctttatttcctgtaaattgatgtttagatttaaagacttaatcagattcagtcttgatttttcttgatgtggggtggagacaaaagtacttcacagttggtcttaacgtacttacattaagaagcatgtgatgtcttggttttcttcatgtaatatcagcaaccattgaagatcattctcaagattatccattatttcattagaagttgcaaagttgtgataatctaattctgtagttttttcttcagtgattagtggaatacttttaaaaa

SEQ ID NO: 552 - DNA, 655 bp, Homo sapiens
taatcattccttggtatccatgaaggatagattccaggaccctcgcagacaccagcatccacagatgctcaagtcccttaaataaaatggcataatatttgcatgtaacctgcacacattctgctatgtatgataaatcatacttagattacttataatatctaatacaatgaaaatgctatgtaaatagttgttatactgtattgtttagggaataatgacaataaaggtctgtacatgttcattacaggtgcaaaaccatccattttttttccctcatatttttgatctgcagttggttgaatcctcaatgaggaaccgatggatataggggccaactgtattcggttactctgaggtatagaaaaggcaaaataaatgatcagttatttttctttaccagtttttaatgacttggtttcataccaatttccaatggtgactaattttgtttttagtaccattatgaattcatggaatgaaatattgttgatgtgtgtcagttgaagcttgttgtcctattgttgaagttctagttgtcctaatctgtgaacctttccatttggcctctgtgtccttttgatacaggcttgatagtctttgcttcattgctttctggtatgacaagaggattcatacatttttcctgcaccag

SEQ ID NO: 553 - DNA, 655 bp, Homo sapiens; identical to SEQ ID NO: 552

SEQ ID NO: 554 - DNA, 313 bp, Homo sapiens
gcttatttgcagttaaaaactctgagggcatgagacatataaacttttcatggggagaaaatcactgggtgatttctgggaggccaatacatgtatggcatctggggacagtatcaggagtcttaggctgagaagtaagaaaactttttgttttttcctttttgactgagatgggatcaaggatgtgagggaaagggaaaaagatgtgttaaaggcagctctgtctagggcctgtccatagattgaaacattatttctttttcttttcttttcttttcttttttttttgaaacagagtttcgctcttgttgcc

SEQ ID NO: 555 - DNA, 313 bp, Homo sapiens; identical to SEQ ID NO: 554

SEQ ID NO: 556 - DNA, 148 bp, Homo sapiens
caagatccgagacattgaagaggcaattccaagggaaattgaagccaatgacatcgtgttttctgttcacattcccctcccccacatggagatgagtccttggttccaattcatgctgtttatcctgcagctggacattgccttcaag

SEQ ID NO: 557 - DNA, 148 bp, Homo sapiens; identical to SEQ ID NO: 556

SEQ ID NO: 558 - DNA, 500 bp, Homo sapiens
ctcatctgtagtgaattaaataacatctcccaaaaattcacctccaccaaagcctcagaatgtgacctgatttggaaatgccatctttgcagacatgattaaggtaaggattggaataagataatcctgcattagggtgggccccagatccaatgagactgtccttaaagtcctccacagcctaactccaggctacctcgccagtgtggattgtctacactgcctgcctgctcctggaaaactgatcttcctaccaaccaaacagctggcttcagcttctcgccatgcaagtgtctgccacatgccacttctctacctaggaagttctccctcctttcacctgaacctgtccaaatgttactcttccttcaaaatagggctccaatctcaaaatttctgctcccatggggtctttcctgatgtcgtgctgccgggcacaatctcaggagactccagcaccactgtttacaccacccttgtgtgtgtgtgtgtgtgtgtgt

SEQ ID NO: 559 - DNA, 500 bp, Homo sapiens
ctcatctgtagtgaattaaataacatctcccaaaaattcacctccaccaaagcctcagaatgtgacctgatttggaaatgccatctttgcagacatgattaaggtaaggattggaataagataatcctgcattagggtgggccccagatccaatgagactgtccttaaagtcctccacagcctaactccaggctacctcgccagtgtggattgtctacactgactgcctgctcctggaaaactgatcttcctaccaaccaaacagctggcttcagcttctcgccatgcaagttcctgccacatgccacttctctacctaggaagttctccctcctttcacctgaacctgtccaaatgttactcttccttcaaaatagggctccaatctcaaaatttctgctcccatggggtctttcctgatgccgtgctgccgggcacaatctcaggagactccagcaccactgtttacaccacccttgtgtgtgtgtgtgtgtgtgtgt

SEQ ID NO: 560 - DNA, 158 bp, Homo sapiens
ttttcctctccctcccccaccacctcctccccaccaaaaaaaaaaaaagaaagaagaaagccacgacacaccagaaatagcctatgtgagtctgcttctaacagccaaaggatgtgtgcactatgagcggctcccttgcaatgtgtgttatagtgagc

SEQ ID NO: 561 - DNA, 158 bp, Homo sapiens; identical to SEQ ID NO: 560

SEQ ID NO: 562 - DNA, 308 bp, Homo sapiens
tcctactgcattaggaacttctcaaacaaagaagcttgatggaggcagacagagaggggcttatcagcttaggacacgggatggatggtacaattaactgtcacacagtcagatataattcactctgatgaggccagagaaagaaaacaaggcaaagaaagggctcatcttgtccctttaggtaatatccaaatatcccagcacggaaaccatcttttcctcaaaggttatctacacacgtggcctgagaagaaaggcagtaagcctttggggagttggggagaaggaaggaaaagaaaacaggagga

SEQ ID NO: 563 - DNA, 573 bp, Homo sapiens
aaagagagaggaaggcactggctttaacagtcttgcccaacctgttctgcggtatgttctgttaactcctttctggcaaatagatgcaaacagcaacccctttcttccctcttcttctccccacaggcataggggcagctacaggcagagaaaagtcccaaagaaaaagacggggcccattactggctgaaataaacccataattttggtcatctagtataagacttccactatcagctactggggctgacatttcactggaaactaccaacctcacaggccctctccatctcccaattctcctcctgaccctgcaaaataggttaatcgaggttaggtcctctaaaatagatacatggaaattaggctgagctaggtccagttttcacgcacttgaacaaagcactaaggtgagaaggaagcatcaagttcttttcttcttcttcttcggttgacattaggcatttacagggttaataagggcagcctgaagaccagaaattaacctgcttagcaacagaagcatcagctaagctgtactggttgttttgatacaggaaaagcagtttctac

SEQ ID NO: 564 - DNA, 308 bp, Homo sapiens; identical to SEQ ID NO: 562

SEQ ID NO: 565 - DNA, 559 bp, Homo sapiens
tcactggctttaacagtcttgcccaacctgttctgcggtatgttctgttaactcctttctggcaaatagatgcaaacagcaacccctttcttccctcttcttctccccacaggcataggggcagctacaggcagagaaaagtcccaaagaaaaagacggggcccattactggctgaaataaacccataattttggtcatctagtataagacttccactatcagctactggggctgacatttcactggaaactaccaacctcacaggccctctccatctcccaattctcctcctgaccctgcaaaataggttaatcgaggttaggtcctctaaaatagatacatggaaattaggctgagctaggtccagttttcacgcacttgaacaaagcactaaggtgagaaggaagcatcaagttcttttcttcttcttcttcggttgacattaggcatttacagggttaataagggcagcctgaagaccagaaatttacctgcttagcaacagaagcatcagctaagctgtactggttgttttgatacaggaaaagcagtttctac

SEQ ID NO: 566 - DNA, 549 bp, Homo sapiens
cattcataaaaacagatgcttcctgagtgcctactttttgccaggcattattgctaggcaaggagaatcagccttgaataaaacaaatcccaaacatgttctcatggaaattagaatctattgggaaagacagacattgggtaagtaattacaagcatgaggagtgttacaaaatggtgctgtaggagaatacaagggacctggccaagatgagggtcaggaaagaccttctgagggaaataatgttaaagccgaaactgatgtctacacaagtcaaaaagttgtatatacacaagtcaaaaagttgggaaaagaatgttccaggtagagggaactgcatattcaaagatgtggaggtaggatggagcatattccatttgaagaaatggaatatgtatgcaatatatatttatttcatctggagaaaggaaagcaaaggggagggtggtatgtaacgaggctagaaagacacgcagggcagtgctgtggaaagatttgtaataattattttatctaacaattatttgttaagtacctcctatatcccag

SEQ ID NO: 567 - DNA, 602 bp, Homo sapiens
gctcagaagcccgcgcactctgcggtgcgggcgagcttttcggtgtgcactgtgacaaccacaaacacacttttgaacgtagtgaggcttggctgctgcgagttacgcaggtatcctggagaggcagggcacccggggacacggatgactcgaggccgacttcgggtggctctctctgctccttcctgtgggggtgaagacgcccgggtcctcgccggcccgtgcgcaggggagcgggaccgaggagcgctctcgctccgtcctgcggcgtcccgcgcccaggtgcacatcggggagctggggacgcaggcgactcaggcagtttctgggagtcgttcttacgtcatcatgtcacgggcagaacagggcagagcgcccgcctttctcgcaaaaccctcctgtcccttgtgtacttacactgttacaagtaaagacttccccaagtgaccaaattttagagcattacagtaaaattggtacttgcagatgcctcagcttgattccttaattgatacgtatctagccacaactttaaactaccgagggacgatgtaagactgctgtgtcgcttttctttccttcaaataaacttttactcggta

SEQ ID NO: 568 - DNA, 594 bp, Homo sapiens
ccgcgcactctgcgggtgcggagcgagcttttcggtgtgcactgtgacaaccacaaacacacttttgaacgtagtggggcttggctgctgcgagttacgcaggtatcctggagaggcagggcacccggggacacggatgactcgaggccgacttcgggtggctctctctgctccttcctgtgggggtgaagacgcccgggtcctcgccggcccgtgcgcaggggagcgggaccgaggagcgctctcgctccgtcctgcggcgtcccgcgcccaggtgcacatcggggagctggggacgcaggcgactcaggcagtttctgggagtcgttcttacgtcatcatgtcacgggcagaacagggcagagcgcccgcctttctcgcaaaaccctcctgtcccttgtgtacttacactgttacaagtaaagacttccccaagtgaccaaattttagagcattacagtaaaattggtacttgcagatgcctcagcttgattccttaattgatacgtatctagccacaactttaaactaccgagggacgatgtaagactgctgtgtcgcttttctttccttcaaataaacttttactcggta

SEQ ID NO: 569 - DNA, 594 bp, Homo sapiens; identical to SEQ ID NO: 568

SEQ ID NO: 570 - DNA, 1300 bp, Homo sapiens
tccatgaaggcttttgttgtatctgtgctgtcgatgaattctaggtcttttcagtctagtggtagaaggcccaatttcagtctgacctgtttcaaggtaaggaataaatgttattcacgaatgaaatatacaggcacacaaaatgagatgtgaaaagtatatgtttcaccaactaattcagggaaaaagaaatgtttgcgttatcaaagctgtttctcatctactaaaagttaaaattaaggagagtgacagatctctacatgagtagacagaaagtaattgatagtgtcaggatattaattcatgaaaatattagtacactcggattatctacaaaaagcttagaaactcagctgtactgcatctaaagccaaggcatagctctaacaaaatgttttatagaatgtacctgcaagtagagtaacagccccaaagatatggaggagacattgatacatcaaaaattgtaacctgtgtgtgtatgtgtgtgtgtgtgtattgtgtttcccttacagtcattactagaatccattttgggaactgagcagtgtggccaggaaatatagattaaatggatatttaaggaagcaaatctgttgcccctcagttgctacaaccattttatccagagtcccctagtgtgactgtcttttatgccctttttttcacatttaaataaattgtttttactctcttgtcttaaactgttttataaacttatcgtacagatgatactttcaatcctttggaaagttatcaccatgaaaattgtgagtaaaagtaggctgatatcggaggagtcataatacagaatgagtagtatttttatttaatacccattggaaccctggaaggtaataagtcaaagtctgaatatccgcctcaagtaagcacctcaaagtagggtgtttaccactatataacaggctgagcaaattaccaagacacacagctacttgacacctgtcgagtttgtcggtttttttgtttgttttttagctaataatctatacttctccccagccccccatagtgggggagaaaagggcaaaaagtatacattctaagctcttgggaaaagataccatactttctttctggaggaatccagtcctgtatagttctagttaatccatacttttctaggtgtcctgaaattaaaagtgatacaaatgaatctttcttgccagggaacaagttttatgtgctaataacatattcatttcaactaataacaatgtaatagtataaaatgttgatggatcaaataaaatttaatttgatgagcaactccataaaa

SEQ ID NO: 571 - DNA, 1300 bp, Homo sapiens; identical to SEQ ID NO: 570

SEQ ID NO: 572 - DNA, 1300 bp, Homo sapiens; identical to SEQ ID NO: 570

SEQ ID NO: 573 - DNA, 634 bp, Homo sapiens
gacaacctggagaaggtctgacagccccacagaaagccttgaaagagggaaggttttgggtcccggcttcctgatccttctgggcactcctgatgtctaagtagctagaagtggtcccaggagaaagggagcctgggagactcattagagcagaaggtcgagagagacatggcctaagagtgaagtgtacagaggtatgcagtaaatgctatttcccttcctgcccttcctgcccctggtactctgggacttggcacttctttctggagtggggcttatcattttcaactttaagagcacctgagggttcttaattctgagacacactgaggcaagccatgatgccaaccgggagtgttgggcactgagaacaacgcccatttgggagagagtggaggaaatgtgtgctctgtggctgatgcttggagcccttctctttgcaccatggagagaggtcagactggctttcactctgcatatgaccagactcttagaagaagaaatcatgccgggcatggtggctcacacctgtaatcccagcactttgggaggcagaggtgggcagatcacctgaggtcaggagtttgataccagcctgatcaacatggagaaaccccatctctactaaaaaaaa

SEQ ID NO: 574 - DNA, 634 bp, Homo sapiens; identical to SEQ ID NO: 573

SEQ ID NO: 575 - DNA, 138 bp, Homo sapiens
cggagtcttgctctattgcccaggctggagtgtaatggcgcgatctcggctcactgcaacctctgcctcctgggttcaagcgattctcctgcctcagcctcccaagtagcggggactacaggcacgtgccaccatgcc

SEQ ID NO: 576 - DNA, 268 bp, Homo sapiens
tttttttcttttttttttgagacaaagtctcgctctgtcgcccaggctggagtccgacctcagctcactgcaagctccgcctcctgggttcatgccattctcctgcctcagtctccccagtagctgggactacaggcacccgccaccacacccagctaatttttttgtatttttaatagagacggggtttcaccgtgttagccaggatgatcttgaacgcctgacctcgtgatccgcccacctcagcctcccaaagtgttgggattac

SEQ ID NO: 577 - DNA, 114 bp, Homo sapiens
ggaggctgaggcaggagaatcgcttgaacctgggaggtggaggttgcagtgagccgagatcgtgccacttcactccagcctgggtgacagagtgagactccatctcaaaaaaaa

SEQ ID NO: 578 - DNA, 138 bp, Homo sapiens; identical to SEQ ID NO: 575

SEQ ID NO: 579 - DNA, 11319 bp, Homo sapiens
gggcggatcacaaggtcaggagttcgagaccagcctgaccaacacggtgaaaccccgtctctactaaaaatacaaaaattagctgggcgtggtggcgggcatctgtaatcccagctactcaggaggctgaggcaggagaatcatttgaacccgggaggtggaggttgcagtgagccaaggtcacaccactgcactccagcctgggtgacagagccagactccgtctcaaaaaaaaaaaaaaaaaaaaaaggaagaagggaaggcaggctggggaggttggggaaaggaagcagggagtgcagatcactccccttccatgagttgttttcttaagatgctagaacttggccaggcatggtggctcacccctgtaatcccagcactttgggaggctgaggctggcagatcacttgaggtcaggagttccagaccagcctggccaacatggtgaaaccccatctctactaataatacaaaatttagctgggtgtggtggtgtgcacctgtggtcctagctacttgggaggctgagacaggagaatcacttgaaccctggaggcacaggttgcagagagctgagatcgtgccactgcactccagccgaggtgacagagtgagactccgtctcaaaaccaaaacaaaacaaaaaccaaggccgggtgcagtggctcatgcctgtaatcccagcactttgggaggccgaggtgggcagatcacaaggtcaggagatcgagaccatcctcgctaacacggtaaaaccccgtctctactaaaaatacaaaaaattagacgggcatggtggcgggcgcctgtagtctcagccaatcaggaggctgaggcaggagaatggcgtgaacccgggaggcggagcttgcagtgagccgagatcacgccactgcactccagcctgggcgacagagcgagactccgtctcaaaaacaagcaaacaaaaaaacagaaaacaaaaattagcctggcgtagtggcatgtgcctgtaattccagctacccaggaggctgaggtgggagaatcgcttgaaccctggaggcagaggttgcagtgagccaaggtcgcaccactgcactccagcctgggtgacagagcgagacttggccttaaaaaaaaaaaaaaaagaaagaaattaaccagccgtggtggtgcacgcccgtaatcccagctactcagaaggctgaggcacgagaatcacttgaacacgggaggcagaggttgcagtaagccaagattgtgccactgccctccagcctgggcgacagagcaagattccatcaaaaaaaaaaaaaaaaaaaaaaaaaaaagatgggagaactcagaactcaagcatatagattattcaacagttcacatagccagatagttcaaggccagctgtgggctttgaatgccatagtaaaatgtttgaactttgccttctaggcagtagggagctactgaaagtttaaagggatggtatactattattctttcattcatttattcaataaacgtgtatgtgtgtgtgtgtattttttttttaagagtccaggtcttgctctgttgctcaggctagagtggagtggcataatcatggctcactgcagcaacaaactcccgggctcaagagatcctcccgccttagcctccatgtaactgggactacaggtgcctgtcaccagaccaggctaatgttttacatttttgtagagacagcgtcttgctatgttgcccaggctggtctcaaactcctggcctcaagtgatgctcctgccttggcctctcaaagcactgggcaatgtccctggtcttcaataaatatttgatttatttaagcaaatcttttttctgagcacctactatgtgctaggcaccattctaagtacttaggatacatagataaataaaataaaggttcttcccttcaaagagcttacatgtcagcaagtaaaggaaaagatgagagaaaatataataaatcagtaaattatatatcatgtcaaaaggtgataggtgttatagagaaaagaaaaagcggagaagggtgggagaattgggaatacaggggtgggacacaggtggcagtattaaacaggatggtcagggtaggcttcattgagaaagaaagacttcaggatgtctgggggaggagtgttccaggaagagagaagagcaagtgcaaaggccctgagacaggagcagcaagtgcatttagaaacagcaaggaggccagtggctggagtgaagcaggaaaggcggggagagggtcatgggttgggggaagggacattgtgcaggtctatgcaggctattgtagggtgtatggagtgaagatgtcaagtcagcagttagatatggagctggagatttggggagcaatgagctggagagatagacttgaaagtcattggcatatagatggtacatcatatcatcatatgagactgcatgggattgccaagaggttgagtgcagataggaaggaggcagagaagaggaaaggactgagctccaggaccctcttgcaccaggcaggggaatcagcaaagagactgtgatggcatggccagaaaggaaggggaaaaccatgcaggatctgggaccccagggaatctgaagggaagagaccagaagtctatggcaattgctcatgaagagatgagggtctggccaaggggccaggtgggaggaaccaggtaagagatattatcatcccaatgttacccttaaagaaaccaaggcccagagaggggagaggttaagaacctgggtcaagatcacacagcttaagtgtgacttcttctttttattttttatttttttgagacggagtctccctctgtcaccaggctggagtgcagtggcacaatctcagctcactgcaacctccgcctcccgggttcaaacagttcacctgcctcagcctcccgagtagctgggattacaggtgcctgccaccacgcccagctaatttttgtatttttagtagagacgggatttcaccatgttggtcaggctggtctcgaactcctgacctcgtgatcttcccacctcagcctcccaaagagctgggattacaggtgtaagccattgtgcccggccaagtgtgagttcttttaagctgtgtgaccttggccaaggtgcttaacctttccctgccaagtctcaaacacctctttgtccagctactatgcttccatcaagaatcaataggacctatgtccctacaggtgtcagggtagctggcagaatggtgatgcccttggcagaggcaggcaaggccaaaggaagggctggttctggcagggagtgaaggatcttactttgagaggtattgaatatgaggtggctgcagacagatggtgacgccatctgagaggcagcaggaagtaggcgctgaggctcaggaggtgatttgagctgttgatctggatttgggactcctcaggacaatctgtgaacaatgatgagagagagcaccaaggaccaaggtctgaacttgggagctagggcccatgtccacagggtgaactggaaggaagataaggagacagcaaggaatgcttgccaagaaaccaggagaccaggaaagagtagtttccaagagatgggggaagcccacactgttgcagggaggtcctgcataaagtctgaaacgggtctatttaattcgcccttggaggctgggcatggtgtctcacacctgtaatcccagcactttgggaggccaaggcgggtggatgacctgaggtcaagagtttgagaaccagcctggtcaacatggcaaaaccccgtctgtactaaaaatacaaaaattggccgggcgtggtggtggaagcctgtaatcccagctactcgggaggctgaggcaggagaatcacctgaatcccagaggcggaggttgctgtgagctgagatcacaccactgcacaccagcctgggagacagagcaagactctgcccaaaagaaaaaaaaaaattgtagttggaaggacttctggttctatagggtggattgaacacaagactttatctccagtccttcctgattttccatcaaagtgacagtaaggaataaagaatgtaaacctacaaggacaaagagaagaggagacaacagcagacaagatattaacacctttttggaaagtgagaaacaggttgaggagtgatcactgacacagcagagaacaactgaaaccaaaggccatttggagtctgtaaaagctcggggattggagggctgaaggaggcaaggggaagagcagggctgaaagcagcggctgctaggagaatgcataaggagagatgaaacacccaagatacttatccatctcctctcaaagccaggcaaattccagccacctcacagaagaccagcagtttattctgtggaattaagtaaaagtctgcatactgaaggatagaaccctcagccctcactcctaaattggtcccagagaaaagacctccagattcttccagttgttgggggagtcttccctaaaggaccaggttcctacttgatcactctgcagtgaagcccaacagccaataagcttggtcctcggtactctgtcttcagtagctgtttcttggtccttggtccttggtactctcactcatcattgttcacagattgccctgaggagtcccagatccagtcccaaatccacctgcccccaacacacagagcagccaactctttagtgtcttactccaaaatattgagacagccaagccgcaagaatcaccacaggtcgggtgcagtgactcacgcctgtaatcccagcactttgggaggccgaggcaggcggatcacttgaagtcaggagttcgagaccagcctggccaacatggcaaaacccctctactaaaaatacaaaaattagctgggcattgtgacacgtgcctgtaatcccagctactcgggaggctgaggcaggagaatttcttgaacctcagaggcagaggttgcagtgagctgagatcgtactaccacactccagcctgggcgacagagggagactccatctcaaaaaaaaaaaaaaaaagtcaccacacatttgaggaaaaattctgttaaaataaaaactttagacaaattaaatttagcagagtttatctgagcaaagaacaattcatgaatcagccagcatcctgaaccagtagaggttcacagagttttaccacccagcagtatgggcaggcagtattaatggacagagaaaggaattgatgtatagaaacagcttgattggcgacagatcagtatttgccttatttgggcatggtgcaatgaggtgtttgccttatgtggacatgttctgatgatctggcagcttgtgattggctgaaaattctgctatatttggctgagacttggctgcttattgtaagaatatactctcaagttacgttgcagtttgtttacatattgaattatgctacagtccactatgtatggagtcagctttatacctgggtgacagagtgagactttgtcaaaaaaagaaggagaggagaggagagagaggagagagatgaggggtggggaggggaagggaggaaaggagaaaggaaggaaggaaagaaggaagggagggagggaagggaaggagggagggaagaagggaaagaaagaaggaaggaaggaaggaagaaagagagagagagaaaggaaggaaggaaggaaataggcaacacataaaataaatttttttaataggatcacaggtcactgtgaacaatagccgttcattaaatgacttcggaggcatatacaaaaagttacatagttgtagaaaaagcttagctgttttaatagcgagttctcagttttcttaagtgatcaaaaacctaacaaagacagcatgaagcacaggaaattatctgggtagaacacagaatctttgttttctaggccaactacctaaagagaaagaaaaacattttacaatttcctattatgatcagaccaataatctaagaacaccatgttgttttaatggagagaaccaaattctagttttgcatcagtgtaattttgatattaatgctagctcttatcgcccaggctggagtgcaatggtgcaatctctgcttactgcaacctccgcctcccgggttcaagtgattctcctgcctcagcctctcaagtagctgggattacaggcgcctgccaccacacccggcttattttttgtatttttagtagagatggggtttcaccatgttggccaggctgggctcgaactcctgacctcaagtgatccacccgcctctgcctcccaaagtcctgggattacaggcgtgagccactgcacccggtcgctaacttttattcttaaaaaacttgtaaataattacctcctaatcttaaccagcttgatcacccataaaatttctttcacaagattcatcttccacaaacctcctacaactcttatatccattcactttttgtcctatactttcctcttctcattttcgaaaaatcagtcatttcactttaggacaaaatttattctctttttccgttatcaaaacaaaacatcctcacgtcttatagcttttccttagcttcctttgtatatttctttttcatatattcctttttcttaccttccttgtatattttcatatagattttcccccttattgtttctagtaattgtagctacatatattaattagaattcttaaccccggccaggtacagtggctcatgcctgtaatcccagcactttggagtccgaggtaggcagatcacttgagggcagaagttcaagaccggcctggctgacatgctgaaaccctgtctctattaaaaatacaaaaattggctgggcgtggtggcgggcacctgtaatcccagctactggggaggctcaggcaggagaattacctgaacccaggaggtggaggttgcagtgagtcaagattgagccactgcactccagcctgggtgacagcgcgagactccatctcagaaaaaaaaaaaaaaaaaaagaattcttaacccttagtgaccttaatttccatggacattagaaagtaagcatttgtgaattgtgtgtcacaccagctgtagattggtaaatctatgaaccataatgtctagaagcatgagctttctcatagtacaatttgtcagtgtggcacagaacatgtttctcaatggtccaaaatgtctttaagtctctctgtaaaaataaactgtaaaggaggcaaaatttcatttgtatccctttaggttttttgtttgtttgttttgtgaggcctgaaaactaaattgttgtttgtacagatttccctcctcctcaactttctattcttgatgctaagagtgttaaaaccttctggtggctgagcgtggtggctcacgcctgtaatcctagcactttgggaggctgaggcaggtggaacacttgacctcaggatttcgagaccagcctgggcaacatggtgaaaccccatctctacaaaaaatacaaaaattagctggatgtggtagcttgtgtctgtagtcccagatactttggcggggctgaggcgggaggattgcttgagcccaggaggcagaggttgcagtgagccgagatcttgccacttgcactccagagtaggcgatagagaccctatttcaaaaaagtaataataaaaccttctggtataggaaggacatcttttacatgggaattttatcttacattcatttaactcacttattttcaacacttatgcttggattgcctataaagatgagataataaacaactagtcatcattttgtttttcttgctgacaaattttataatataaagacaacataagcttgttttaccagtaaacctagataggaaatcatgcatctttatgatatttaatccccaaaactatgaaaacatgtctgtttcagtcaaaccaacaatattcttatttgccaaagattacccaagtcagatgagctgcaaaagtatttgaggtagttcttaattttctgagagaatacttcatttatacaagcacttatttttcttaaagccaacaaaatagagctctttcataatttaattttggagcattaaaaggagataagaaactatgatacctgtatcatacatacagacttatataaacataaacagcaacagatcttacagctttcatttaaatatcttagccatgttccaggtacagtaatataaaactcctgaatttattaaagactatctggatccaaattgttcttctggccaatggaacaagatttcttgcccagatgactaaagcttttgaataagattcgtgaaggagcttttaagatttttttgtttgatttctgtaaggaacctattataaagaggcaattttttattcatttaatcttttagatgcctctgtgtatcaattaaagaatgcatcccattgcttttgtggcatttttgaacctttcttttctaatgcaccttgcaagtgaacagttttatctaggtcaaaactttcccactgtggccactgtaactcttaagttgtcctcagcaaagttaacccatttttccaaaaatacacatgttcctcataattgttgttcatgaagttagccaccgtcccagaaagtggcgtctcagactctggagtcccagactccttagatttggaggaactcactttcaaaaggcacctgcctgaggcttttaactggatccatttcagttaattatcagatctgatttgctcctggacccagtcctacttgacccagtctaagaattgttcaaataaacttggagaacacaaaacacaaattcctgaagcttggaatctgagatagaactcacccatgacctccagttgctacaagagaacaattggcacagtgtgccctgtcaggtacccttacttggtcactaaatgctcctgagggtcactggagttctacttccgatcccacttctgacaccaatctgttaaaagaaaagctttaggccgggcacggtggctcacgcctgttatcccagcactttgggaggccgaggtgggtggatcacctgaggtcaggagttcaagaccagcctggcctacatggtgaaaccccatctctactaaaaatacaaaaattagtcaggcatggtggtgggcgcctgtagtccaagctactcaggaggctaaggcaggagaattgcttgaagctgggaggtggtggttgcagtgaaccgagatcacgccattacactccagcgtgggggccaagagcgagactgtctcaaaaaaaaaaaaaaaaaaagaaaaagaaaaagaaaaaggaaaagctttagacaaatttagcagagcttatttgaaaaaataagcaattcatgaattcagcagcatgctaaactagtaaagactcggctgggcgtggtggctcacacctgtaatcccagcactttgggaggctgaggcaggcagatcacctgaggtcaggagttcaagaccaccctggctaatatgatgaaaccccatttctactaaaaatacaaaaaaattagctgggcgtggaggcacacacctgtaatcccagctactcaggaggctgaggcaggagaatggcttgaacctgggaggcagaggttgcagtgagccaagatcacaccattgcactccagcctgggcaacaagagtgaaacgccatctcaaaagaaaaaaaaaaaaaacctaaaccagtaaaggctcaaagaactccacctaaccatgtggtcaagtagtacttacagagagaaaaaaagtgacacatagaaatagcctatttagaactcggcatttgctttatctggacaggtctaagcactttgcagtctgcgattggctgaaagctcagttgcaatgattggctgagactcagctacttgttacaagaaactctcatgttaggtttgtttacatattaagttgggtttcagttcactatgtaaggaggcagcttaaggccaaatttaatctaatttaacacctccagcttgaaagacaaaaccaaaccaaatcaaccaagaaacagaaaaaagaaaattcaaagatgtatgagcatgcataactttgataaaaataaaaataataattatttgaattggcaattagaaaatagttatatcctcaggtaacagatgtctctaggtggatgagattgtgggtggtttttcttgttgttgatattttctgtgcatctctaaaaaacatctaatgctttgcaaagaacataagaaacagattagtacattagtggccttggaggaaacaatctcagtaaaacatgtgtttattaatgaatgtattcccccatccctttccaaaaaagttcataggtgtagttatagtcaaaggtaagaggcagtcttgtcagagccagtaaagtaaccaaccatcctggtttgcccaagaccaagcagcttcccaagacactagactttcagtgctaaaaccagagaagtcccatccatactaggagagttgatcactctagtctgtgtaatttgcaaagactctccatatcctttggttcctgtgagtctcaaatccacccagtgaggtacaggtgggccggtggatggtcacctccatttcagaagagaggcagctaaggctcagggaatctccctatccctgacccgggaaaggccttaagagaaagtggtcttttaaactgtgtgtatatatcactttgataaaattaaaaattagttttaaagaagagagagggccaggcgcagtggctcacgcctgtaatcccagcactttcggaggccgaggcgggcaggtcgtaaggtcaagagatcgagaccatcctggctaacacaggtgaaactccatctctattaaaaatacaaaaaaaaaaaaattagccgggcgtagtggtgggcacctgtagtcccagctactccagaggctgaggcaggagaatggcgtgaacctgggaggcggagttttcagtgagccgagattgcgccactgcactccagcctgggcgacagagtgagactccatctcaaaaaaaaaaaaaaaaaaaagagtgagggccaggcgcagccgtcacgcctgtaatcccagcactttcggaggccgatgcgggcagatcacgaggtcaagagatcgagaccatcctggccaacatggtgaaaccccgtctctactaaaaatacaaaaattagccaggcgtggtggtgggcgcctgtagtcccagctactcaggaggctgaggcaggagaatcgcttgaacccgggaggcagaggttgcagtgagccaagatggcaacactgcactccagcctggcaacagagtgagactctgtc

SEQ ID NO: 580 - DNA, 569 bp, Homo sapiens
cacaaagcctgggtgcctgtcccggccacacactgctgggtgtccttgaacctgttgccaaagtgggtgtagtttctcttttgtacactgggcctaacagtgcccctcctatatacccctggaagttgttctgagacaacatccagataacaactaggtaagtgcagtaataaaatgcgggagaaacattaggggcctttattttcctcacttaactggctgccagggaaaagcaaggaaaggtcagaggctggggtgccccagagaggccccatgtagatgaggctctggctgggcccagagaaatgggatgtacactccggcccagagacctgaagatctgggttcagggcagctttgggacaggctatctggatggcaactaactggagtacctgatcaggcctagaggtgtgtcctgtgacccagtgtccaggcctgggccagcatgtcagagactcagcaagagtatgtgggtccttggctcacattgtttgagcaactactgaatactgaataggactactgaatactgaatactgaataggacaagatgtacatggtacaac

SEQ ID NO: 581 - DNA, 1555 bp, Homo sapiens
ttgcaggtgtatacaactgtcaaaactcactgattgtacactttaattgggtgcagtttttgttgcccttaaattatgcctcaattagagagaaagagagagaatataaggaaatgggggcagccatggcgtccttggagaattcacacttgggacgacaactgctcatttgtgtactctctcctcctcacctgtcttccactccacccctgtctctgatggaacatctctccagctaagccatcttcctcaaggcagcccaattctctgtggggctgccacagcactaaactgttctctgtgtccccaggactccaacctgtctgtgcacacagaaaacccggacctcactccctgcttccagaactccctgctggcctgggtgccctgcatctacctgtgggtcgccctgccctgctacttgctctacctgcggcaccattgtcgtggctacatcatcctctcccacctgtccaagctcaagatggtcagtggctcagggatctcctaccgatggggctgggccctggggattctgcttttattttttaatttaattaaattaattaattaattaatttagagacagagtctcactctgtcgcccaggctggagtgcagtggcatgatcttggctcactgcaacctctgccttctgggttcaagcgattctcctgcctcagcctcctgagtagctgggattacaggcatgcgccaccacacccagctaatttttgtatttttagtagagatggggttttgccattttggcaggctggtctccaactcctgacctcaggtgatcagcctcccaaagtgctgggattagaggcatgagccactgtgcccagccagcattctggttttaatgaggccctctcccacctcctcggctggactgggttccccagtctcacctgacctgcttggggtcatgggaatctgacaactgagaatatatacagccagctgacatattccccacttgggaaagtttaagtaagttcagcaacactctccccacctccagcaagcttctggtcagctccattcccagacctcagtgccagtcccaggcaggtctagtggattctggtggcttcaggtacaaagaccccttcccagtgaggactgtccttgcctctggggatgcggattccaacctgtgctctcttcgcaggtcctgggtgtcctgctgtggtgcgtctcctgggcggaccttttttactccttccatggcctggtccatggccgggcccctgcccctgttttctttgtcacccccttggtggtgggggtcaccatggtcagtgtggggccctgggaaagtggatgggggaggtctccattgggttgtggactgtgatagggaaactgtgggctctgaggagagggctggacatattgggaatgggaagaagaagggggtggccccagaaacttctggccatgtgggatggggagaaatggaggcaggtccagatgtgtgtgttctgcccgggcctccctgccctccctgcacagctgctggccaccctgctgatacagtatgagc

SEQ ID NO: 582 - DNA, 473 bp, Homo sapiens
ccaaatgccaaaaccaacccacaaaataaaccttggttaaagtagcctgttcattttgctttaactatgtatattgcaccagattctgccaggggctcagcgtataaagatgagacccctgccctgccagacaggtgggatgatggccataccttgagttagtcaaggcaccatctggctgtgtaacaaaagctaaaacatcagaggctgagcagcactcggacccacatcccagtccaagtgtcagtcgttatgggggcccaggacagcccggacctagttcattcctttggtgcatcctcgacacacagcttccatctcttgagctgagatggttccagctcctgccgtcatgtctgcactccagccagagggaagggaagaagggagaggggaaagggcaagtgtccctctttatttttaagggcatgacctgaaagttaaacacttcagctccttcccactggccagaa

SEQ ID NO: 583 - DNA, 473 bp, Homo sapiens
ccaaatgccaaaaccaacccacaaaataaaccttggttaaagtagcctgttcattttgctttaactatgtatattgcaccagattctgccaggggctcagcgtataaagatgagacccctgccctgccagacaggtgggatgatggccataccttgagttagtcaaggcaccatctggctgtgtaacaaaagctaaaacatcagaggctgagcagcactcggacccacgtcccagtccaagtgtcagtcgttatgggggcccaggacagcccggacctagttcattcctttggtgcatcctcgacacacagcttccatctcttgagctgagatggttccagctcctgccgtcatgtctgcactccagccagagggaagggaagaagggagaggggaaagggcaagtgtccctctttatttttaagggcatgacctgaaagttaaacacttcagctccttcccactggccagaa

SEQ ID NO: 584 - DNA, 1374 bp, Homo sapiens
ttttttgtttctttttttttttgagacggagtctcgctctgtcgcccaggctggagtggagtgatgcgatctccgctcactgcaagctccgcctccctggttcacaccattctcctgcctgagcttccagaatagctgggactacaggcgcccgccaccacacccggctaattttttgtatttttagtagagacggggtttcaccgtgttagccaggatggtctcgatctcctgacctcgcaatctgccctcctcggcctcccaaaatgctggcattatgccactgcgcccggcctagggtaggttgttagaaatgtaccagcctgccagtttcagccttgtttgtctttcatccttttttttttttttttttttttgagacggggtctctctctgttgccccccaggctggagtgcagtggtgtgatcctggctcactgcaacctctgcctcctgggatcaagtgattctcctgcctcagcctcccaagtagctgggattacaggtgcccaccaccacgtccagctaaattttgtatttttagtagagatggggtttcaccacattggccaggctggtatcgaactccttacctaagggtgatccacccgccttggcctcccaaagtgctgggattacaggcgtgagccaccgcactgggcctctttcgttctttcttaatgaaaatcttcctgaaagatttgcctactgatgtctgtgtcaataggtactgcctgcgggacagagcctgccctccttttgaaggtctttctctgtctgggtgaccatctgcatgtcactccctgctgctcagaactaaagatgtagctatgcctggggtaggttgggaaaacctgtgggaatcacagagcttgctgtcatgctgtgttctggatacctgaagcttggcaggcaggtgggatcgagggcgggcattaggaaagtgatgtggctctataggaaggggacataggtcctgagattttaggtccccaattggacaaagctgttttttttttctggataaatgttctagcttattcataattgagtggtcagttttcttttcttttcttttctttttttttttgagatggagtctcgctctttcgcccaggctggagtgcagtggcgctatctcggctcactgcaagctccgcctcccaggttcacgccattctcccgcctcagcctccagagtagctgggactacaggcgcctgccaccgcgcccggctaattttttgtatttttagtagagacagggtttcaccgtgttagccaggatggtctcgatctcttgacctcgtgatccgcccgcctcggcctcccaaagtgctgggattacaggcgtgagccaccgcgcccggccaag

SEQ ID NO: 585 - DNA, 3116 bp, Homo sapiens
ttttttgtttctttttttttttgagacggagtctcgctctgtcgcccaggctggcgtggagtgatgcgatctccgctcactgcaagctccgcctccctggttcacaccattctcctgcctgagcttccagaatagctgggactacaggcgcccgccaccacacccggctaattttttgtatttttagtagagacggggtttcaccgtgttagccaggatggtctcgatctcctgacctcgcaatctgccctcctcggcctcccaaaatgctggcattatgccactgcgcccggcctagggtaggttgttagaaatgtaccagcctgccagtttcagccttgtttgtctttcatcctttttttttttttttttttttttgagacggggtctctctctgttgccccccaggctggagtgcagtggtgtgatcctggctcactgcaacctctgcctcctgggatcaagtgattctcctgcctcagcctcccaagtagctgggattacaggtgcccaccaccacgtccagctaaattttgtatttttagtagagatggggtttcaccacattggccaggctggtatcgaactccttacctaaggtgatccacccgccttggcctcccaaagtgctgggattacaggcgtgagccaccgcactgggcctctttcgttctttcttaatgaaaatcttcctgaaagatttgcctactgatgtctgtgtcaataggtactgcctgcgggacagagcctgccctccttttgaaggtctttctctgtctgggtgaccatctgcatgtcactccctgctgctcagaactaaagatgtagctatgcctggggtaggttgggaaaacctgtgggaatcacagagcttgctgtcatgctgtgttctggatacctgaagcttggcaggcaggtgggatcgagggtgggcattaggaaagtgatgtggctctataggaaggggacataggtcctgagattttaggtccccaattggacaaagctgttttttttttctggataaatgttctagcttattcataatcgagtggtcagttttcttttcttttcttttctttttttttttgagatggagtctcgctctttcgcccaggctggagtgcagtggcgctatctcggctcactgcaagctccgcctcccaggttcacgccattctcccgcctcagcctccggagtagctgggactacaggcgcctgccaccgcgtccggctaattttttgtatttttagtagagacagggtttcaccgtgttagccaggatggtctcgatctcttgacctcgtgatccgcccgcctcggcctcccaaagtgctgggattacaggcgtgagccaccgcgcccggccaagtggtcagttttctcagctgccgggtcttgcacaccttgctggctctggagaccatatgcaccatgtagaccccatttgtttcctaccctcagtgttgggggaggggccaagggcctgtcgatgtgttgacacctggccattcactggccttgaatgtccacattcacctccttgaaatcgatgccccgtatcggaggctccatgtggatttgggggcagaggcctgtactccagatggtggggtggccttcaccaatcaggcagattccctgccctgccctgccctttgggctctgtagctccagatgtgtgctcaagatctgtggccacatggatgggacaagccacagagactcagactccgtggtccctgtgaccagagtagccgtggccctgtctgggaatgttcccaccctgttgctgaaggtgagaaatttctctgtgctggagaacagctgtgctgagaagttggcccatctggcttgcaggactgctggggcaagggaggtctgctgccggtctcttccttcctcctctgactgggtgctccttgtctaggttccttgcagcaaaagaattctctaatttattttgttcccttattgagtctctactccatgaagcccacctcctaatcccagctgactggctcccacctcctcaagaggaaggccaggggcagacgaggctgaaggaggctgactcccctgtgccttcgcagtctgagctgatgctgctgtatgttcacagggctccttcagcttttaaaaaggcttcaacacgttcgtcacacgcttgtggctctcctggatgccacactaactcagtaaggcctgagttagaggctgttcctgaggctgtgaaaatagaagaagggtccagaggagaatcccttcatctgacgatcccaggaaggcttcctagaagaagcagcctctgagctgagacctgaagacagatcaggcctgagtcaggccagggagggtgtgaggggcccaccaggcagagggaacaggatagggcaggcacagaggtctggcacctggcttgtggggaagtgtgagcccctgggcatgaccaaggcggggagaagtggcgtgagaggaggcagatgtggctggcaggagatcggcggccccggccttgctgagctccactctgtatgcaccaggtgacagaggctgcccaggacggtgggcagggaagtgacaggtcacatggtcatcccaccaacagccgggagtccagcttggggggacccaagaccctggggaaggcacgagtcaggggcctgctagagccaggagctagtgggagaaggaaacagtgttgcttatgaattataaacagacactcccgcaactttctctgacgtgatacaatctcaaagtgggccacccagaggtgggaaggtgacttctggctctccaggccttgggcctgtcttttttttttttttttttttttttttgagatggagtctcactctgttgcccaggctggagtgcagtggtgtaatcttggctcactaccacctctgcctcctgcgttcaagcaatcctcctgcctcagcctcctgagtagctgggattacaggcacctgccaccacacccggctaatttttgtatttttagtagagatggtgtttcaccatgttggccaggctggtctcgaattcctgacctcaggtgatccgcccaccttggcctcccaaagtgctgggattacaggcatgagccac

SEQ ID NO: 586 - DNA, 10953 bp, Homo sapiens
gtgtgttttttattttttgtttttttttttttaaaaacctggaatgaagattgttattcttgggggtgataacaggtttagtttctgtctctgtcactagtcactggtctctccaatgaagtatatgtaaaactttcagcactgtggctggcaccaagcaaacaataaatgatagatgccagcttacagttgccaccttttcatagaaagcctccttcctcattcaactttttgcttgttctccagagaatcacattttggaagatgtgaacaaatgtgtcattgctctccaagagaaggatgtggatggcctggaccgcacagctggtgcaattcgaggccgggcagcccgggtcattcacgtagtcacctcagagatggacaactatgagccaggagtctacacagagaaggttctggaagccactaagctgctctccaacacaggtacgggaactctccctttccagtgctcgcacacaccgcagcctcagtgaggcaggccaccccattagcccagccctgtggtgaggaaggaggagttgggaactcagatttggtctcatggcacatcgggctcctgagaagctggtcatagccaaattcaggcctcacaagcatattttcttcatctgtatctcatgagtaatcacgggactaattctaaacacacgatttaagatgaatttctgagttaaatctcctattagtgagtaaagactaaattaaggtaggtcccattcttaagcaaggcttcaagttagtctcacttcaagttctcaaccatccaatctctgttgcagagaaaaagatgatttgagtcgtaaaatactgcatttaatttatttcaactgtaaatacccttcacacaggtagaagcagaggctcatcataagcctcacctctttctgtctagctgagtgattcagggagggccaggggaatgatgctgcctgctgaccagggtatctactgtgcctctttctccacagtcatgccacgttttactgagcaagtagaagcagccgtggaagccctcagctcggaccctgcccagcccatggatgagaatgagtttatcgatgcttcccgcctggtatatgatggcatccgggacatcaggaaagcagtgctgatgataagggtgagtaactgcatttcagacgtcttaacagcttctttcttatcatttgctaaacttgagcaatgcgtcattctagaactcggcagatgcggtggcagtatattaaaaccatgaatctaaaagctgttagaatgagatatatttaattacgttgtctaaaatgactgttagttgcaagttagagcccaaacttgggccaagaaggggagctagcctgagttgacgatttaatttaggataaacagtctctacaacatgaggcttcagtttgagttaggcaggaaattatagaaaataatggttctcaagctagtatcagagaaggaagtattttcataatgcggattcaagttattgttcacatgaagtgcccctctcttcggaggggctgcaggcagacgggatgatggaaccccagggtgttggggggaggagcggccccaggtgatgctcctaggctcatggccaagtgccgagcccctttccccatagccagagtgcctggagggcctctgtcgcaggggcagaggagaaaggggcctctatggcatctgtgattgagctcccggcataccgtcctgctctctgacaactattcctgtcttcattcaagaatcatccagcccctgggcctctcagtttcttgatgtcttgtcctcctccacctcaacctcacggccatagctgtacctcagcttttgtcactgcctgccattgtctttgtcatccccagcagcctagatctattgttcaggttgcgccctcgagtcctgcaactcccagcgagcctttgagtctactgtggggtcttcagtcagttggtcctccccatgtgtcactcagccccttgtgtccttggttcagtcctttgttagctttgagtccatagttgaatatactcactcctctgccctgctgtttcctcacacctgccttgcaaggtgcagtcctggcaagatcctgctctcctgagcacagtgcagatggccacagccacgctgatggagccgcagaagccgcggccatttgtgcgcccttgctgccctgcaacaggcgtccacccacccacccacacctgtgcccctgtcctgtttggcccacttgccgatttcgttgaggatactgaggcagttagtgcgtccacccctctgcatcccatgtctgtgtgctctaccttcctcctagcaccatgggcattgctctcggtgcttctggccaaggccatcccttgcacgtctttgtactaggatcccagcttcttcaccccctgcctcctgtacctttccccaagcctatgatgatttctcccatttttagggggaaaaaaaaagtctcttgacccacaccccttctcagtctccttggctggtttctccccatctcctcagcctgtgaaacacgggtgtggcctgctgggaagtccttgacctcttcagagtcctgtctagaggccgactctcctaagttccacacctgtctgcgcaccttgcctcctccctctcacttgctccacccaggcagcacatgttagttgatagtgactccgtcttcccttgctcgggcccagacctcgaatcttttatttcccttttgtcccatacctcacatctgctttatctgtgaattcttttggctctccgttcacagtagagaacctgaacatgttctcaccctcgtctaagccaccagcacctctcacccgggttcatgcaggtgccactcagctggttccctgttcccatcctgggtgcctacagtctcatgagccacagggcagccagagcgatttctgtaagcttcaatcagatcatgttatcctctgtgccagcgtctccacaggccgccacgtcactcattctttatgctggcctacgaggccttctgggactggaacctgtcacttctccaaccttatttcctgctgatctcctcttgtactcatggggttccaggcaagccggtgacatgggggcagtgagctaagccccccttctgtggcctccttgctattcacgcagttccctgggccaatgccccttccccacggcctctatgctgccacccgcccccccttccccctccttgagagcaccttctcgtgagacttttccaaacacccatatagaattaaaatctccctttattcatcactgctttcttcatagcactggtcacttttgatgtgtcatataattcatttgcttactttgttgtcatttcttccattagaatatgcgagaggaatttttgtctgtttgtcactttgtatctttagggcccagaacagtgcttggcagagagataatgaatgaatgaatgaatgaatgaatgaatgaatgagagtactcggttttcttggcaagaacggttcttgggtctgcgatggggtgctggggaggtagagatgatgttaggaggtggtcctttgaaaagccccttaactgattgattgcatgccagtcccgaaggcatgtgtgactgcagcgttaaaactgtcagtgctggcattgtgttttgtgccaccgagtccatcggcctccaggacctcacaccgacatgctgtctggtcccctgcgtgagcgtccactgttctcacctcatcaagggacaggcccagcctttgcacagcacgttcttggtggttccagaatgtttcttgcatatcttcttgtttgaacctcactgcaagtccttgggctgggcttggactatgtcctggtacacagacgagagactcgcctcactgccctcctgtcacaggccagccggctgggctgagcgccaaccccagctgttctgcctgctgcccccttactgataactgccagaggacaacattatgtttcaagtcagtagctaatcatgagaggctggtagttggtacaaaataagaattttatttcataattaaagcaaagagctaggaccagtaatcagtcccttgggtatttactcagccctcacctgccatattctcccctcttttcttttgatgaaagtcaaaagaatactttaaaatacattgcctatttttactcctccaagcagccttggtaccctaacagaaggcccagttatttaattttctttttgtcataaagtaggaaagttatacaaatccgcttaatactatacaaaacacctctatttttaagtcagtaccttttctacccaggacagttctcatctttgtcttaaaatgccggtgttggggaagtaaattaggaagtaaaaaccttatgtcactgggcacaagtggctcacgcctgtaatctcagcactttgggaggccagggcaggcagatcacctgaggtcaggagttcaagaccagcctgaccaacatggtgaaaccccgtctctactaaaaatacaaaaattagccgggcatggtggcatgttgcctctaatcccagccacttgggaggctgaggcaggtgaatctcttgaacccgggaggcggaggttgcattgattccaagatcacgccactgcactccagcctgggtgacagagcgagactctgtctcaaaggaaaaaaaaaaacaatcatgtcttacaaagaaatagtgaattgactcagtgatagcaattgagccccacacacagtgaaaccagcccaggcctgctgtgggccaggcagcccagcgtgtgcaccagtgaagcagaggctcgagacaaatgctgagtgattttgactttattcaccatactgttcagaacactgcacattaaaatccagaattctgggcctccgtgcacctggccaagaggctcagggtggctgggggctggtggcccagagatgtgtctgacctgtgatctttgtctgggtggcagacccctgaggagttggatgactctgactttgagacagaagattttgatgtcagaagcaggacgagcgtccagacagaagacgatcagctgatagctggccagagtgcccgggtaaggaagcgctccgtggggcagttcagcttgtgctgccgactttccctgtcccctttcttgtttccaggaaaacaccctcagtattcagaacaccgtttctctctctctgtctctctggcagtagactgaagttaaactaagttgtggcacctgctagtcaaatgtagcctcctcagctagaggcagaccaggtcctgggcctcctctgcagtgccctgagctttagtttatgatagagccctgggtcagggaagggctaagatttagtcaatgcagtgtttgttgaaaggatcgtgaaatttgaaaaagattgctgcctttgtccatctcgatactatgggtatgaactatttaattattcatgggtttaaaaaataacagtggtacattcaagaaagccagtcagagccattgcattcatttgagtcattaaatcttcaatcaatagcatttatgttttggggaggatgccaagaaatatttctaaggagtctttgatttcactccttggaaatctgtcgtgaacagcgagcacatccctgccttatgtcctgctcagtcatgagcacttagggaagctgagagggaggagctccccagccgtaggtctgtgggctggaggtgggcagcaggcctccaggtgttgctcaagtatggcctgagtgccagcggtatctctcagccctctttcttcaggtgtacattctaaagccactttcagttcatcttgaatagttggaaatgtccatcagggcccaccagggaaagggctccacactttcatcaaccccttctctcatttcttgtcttatattaataagaattaagcaggttctgtccctgcacaggtgtgattccaaagcttccacattagccttccacccctcgctgtttccttccacactaaaacttgtgctcaaaagtgggtcggaaattcaggctgccataagtttctgcaaaaaatgagagaaatagcccttcaggcgaaatgaaacctattaaagcattatcctacctatgccacagattgcctgttggaaatattcttggctaatgcactctgagaacttcatattctttttatgtaagagctctttgtgcttctgatcacaggcgatcatggctcagcttccccaggagcaaaaagcgaagattgcggaacaggtggccagcttccaggaagaaaagagcaagctggatgctgaagtgtccaaatgggacgacagtggcaatgacatcattgtgctggccaagcagatgtgcatgattatgatggagatgacagactttacccggtgagcagcaccccggccccaccaggctgcacaggggctactttcttccccacaggtcacctgcgcagcggctcagacagcccaggccatggggctttgtggacaatcttctttttctactccaactgtgaggggcttcacatacaataatccttgttctcttccctcttctcagaggtaaaggaccactcaaaaatacatcggatgtcatcagtgctgccaagaaaattgctgaggcaggatccaggatggacaagcttggccgcaccattgcagaccatgtaagtgacagacttgccaggtgggtctccaagctcctcctggggctcaggcagcccagcctggtccattcagggtaagtttcatgggccacagcacttttgccactcatctctaaaaatggttcttattaatcccagcatagatttgtaaggattctctagagcggatgtgtatgtcctggaatcttccatcgcttggtagccaaaattaacctctgctattgtctcttatgtctcagttccctctctccccctctgggcaggggccgagagcagccagaagccatgtggccagtgctgtggaaggctggtgtgcctagatgggcccaggtttcttcatcctcagcactgtgtttctcagccaccccgtcttcatccccctattccctcacactgataggtacaaaaatacggttcctaccgcctggaaattgtacaatacatttcatttggtgttttaagcctgatcaagagaagctctttctcagttacagtttttctctgtagttaacaagcctccccaccattttccctgaaatagccaaactctcagcctcatctaggccacaggatgtgtgagacacaagcctccttacacaagccaaagattgtaaaggcatccttgactcccacacaatcggtaatagggcctattgcttccattggccaaatgtatcttgacacaaaccagtcttgtcctttctgcagatctccatagccacttggactactgtggccgctcccgatttcctgttctttcctctctccacttccttctgcatccagctgtcaatactgtcatctgaaaatgcagatcacatggctctgccctgcttccatgactacttagaatacagctcatctccagtatggtctgcggggtctcagttcataccactctctgtggtgtactttgctccagcctcactggaagaaaatgtttgcttgctataaacacttgagaggtgctctgtgtttctccctttgggtaaagctttctaggctggtcctaatctgggagcctctaaaactctgagatgtggagcgagacaggaactgggcaggggccacccttttctctttgaccatccccaactgctttttttcttgctttactttactcacttgtcttccacctcagcctgcagtgagtggcttttgtcatcaggcattaataacgcaaagtgcctcagagcagaagagttaactatttgtttacttagctaaaaacatctggacttttctccatagccaggctcctgcttgctgagccggcttgttctcacctcgaggggcatgggcctccaccctgccgtttggggtgaggggatccttggccagggtggtttccccgccgtcataggagggaagtcagtgggaggctcagaaggccttggctatacaaccagtgccatgcggcgcagtcagggtcccatggacgacttccatcagctcacccgcctccatccccaagcagagtgtaggcaagggctgtgactgcctcaggtaattgggtgattttgctccagcaagaggagaggaagcatgtgagtgccacactgaacctttcagaaacagccgtggggtcgggggtgcttgggccaggccaggatacttggtgttaagcctgctctctcttcagtgccccgactcggcttgcaagcaggacctgctggcctacctgcaacgcatcgccctctactgccaccagctgaacatctgcagcaaggtcaaggccgaggtgcagaatctcggcggggagcttgttgtctctggggtaagcattagctgaacaaaaagagggccagtgggaacgtgctgacccttgtcagaaatgaaagtcacctcctatccgcataaacacctgccctgggaaagtgtgctgtgcagaaactccaagtcctgtcccagtctctggagaccaaggtctgtccatcatctgttccctgtagaactgtgacacctgcggggcactgcaagggctgaaaggctggcctcctcccctttgctggccactcactgggtaggaatttttaaaaatcttccttgggaccgggcgtggtggcaggtacctgtaagtcccagctacttgggaggctgagacacaataattacttgagcctgggagatggaggttgcagtgagccgagatggcaccactgcactcccgtctgggcaacagaacaagactgtctcaaaacaaaacgaaacaacaaaacaaaacaaaacttccttttcttcccccagagaggaattaagagtagacatagatagggtgttttctcaaaagcccttcactcctcagagtgcttgggtagcgtctctttctttttaccacatcacagttctgaggcctttctcacctagggcaggggaaagaagaggtttgctgagtggattggggtccaccgagcctccatggcttctcttaatcccactgaatttcctttaaaagaaacacttcttatattgaacatattgagaccatttgctcatctgctttgccataaacatccctgtctcgattcctgcttctcctcccccacgtgcttacagctctgggatcacttacagtgacttccagttggtttgagtgaataaacacttgctgaggggtgggggtgagcaaggcgaggttgcctcatgtcttctccaaagggtctgagggcaggcgcttccaggctatttagataagagcagccgttgagggtgttcttcaggaacaggctgctgcccaatcctctgcgacctgcccaggccctggtcttgcagaggagtagggggctccccttcaagcacagcccacctgtgtccacgaggctggaggtcaggccggtgcttcttaccacccctgtctgcctcgtaggtggacagcgccatgtccctgatccaggcagccaagaacttgatgaatgctgtggtgcagacagtgaaggcatcctacgtcgcctctaccaaataccaaaagtcacagggtatggcttccctcaaccttcctgctgtgtcatggaagatgaaggcaccagagaaaaagccattggtgaagagagagaaacaggatgagacacagaccaagattaaacgggcatctcagaagaagcacgtgaacccggtgcaggccctcagcgagttcaaagctatggacagcatctaagtctgcccaggccggccgcccccacccctcggggctcctgaatatcagtcactgttcgtcactcaaatgaatttgctaaatacaacactgatactagattccacagggaaatgggcagactgaaccagtccaggtggtgaattttccaagaacatagtttaagttgattaaaaatgcttttagaatgcaggagcctacttctagctgtattttttgtatgcttaaataaaaataaaaattcataaccaaagagaatcccacattagcttgttagtaatgctctgaccaagccgagatgcccattctcttagtgatggcggcgttagggtttgagagaagggaatttggctcaacttcagttgagagggtgcagtccagacagcttgactgcttttaaatgaccaaagatgacctgtggtaagcaacctgggcatcttaggaagcagtccctggagaaggcatgttcccagaaaggtctctggagggacaaactcactcagtaaaacataatgtatcatgaagaaaactgattctctatgacatgaaatgaaaattttaatgcattgttataattactaatgtacgctgctgcaggacattaataaagttgcttttttaggctacagtgtctcgatgccataatcagaacacactttttttcctctttctcccagcttcaaatgcaaattcatcattgggctcacttctaataactgcagtgtttcccgccttgggcttgcagcagaaaaacctgacaacatagtgtttgctaaggcagtaatttagactttaccttatttgtgattactgtagtgattgattgattgattactattaactacaaggtataatttactatcaccttatttaaattttatgaattaatttgaatgttttttacactaactaacttttcccaataaagtccactatgaaaccacgacatccaagagcccaaagtcgtcttctctgccttcaagtcatagatttgcccgcagtatctgtggtgctctgggccctcccggtgtccgtctcttccaggatggggatgcccgggagggaaactgtctgtggctctaggctgcacggctcgtgccaacccatcagggagggccatgcccgttgtc

SEQ ID NO: 587 - DNA, 188 bp, Homo sapiens
taatatgtttactcttttcattagttcagtggtataaaccctggcaagtctcataatttgtaattaatagagaccaaaatatggtcttaactatattgcagtaatctagttttcccttctctaataagaattcttactgtttcctggccttccctggaaaggtgttttttgtttgttttggcttttgt

SEQ ID NO: 588 - DNA, 559 bp, Homo sapiens
attccccatcatgtctgtattctgtgggtcacacagaccaaggccggtccactgtggaaggcaaggacgaggttgccagtgcccggcggtgggtggccacagccagcctccctgccagtgtcccccacagacaagttgtccctgtaagacaggtcagctcaggtcattccgagctcagaccttccaacggcgtccatgtccctcagtaaaagccagagtcctaaaggcctcttgcctgctctggcctcctctcaccattctctgccatcctccatctgcccctggtgtccctgaagtcttgaacatgccgagcacatcctgcctcgtatgcttcctggcctggaatgcacttgccccgggacaccctgtgctggctttagtgtttccttcctgtctcctcaagtcaccttattatcaaaaggactccgacaggctaagtgtggtggctcatgcctgtagtcccagcactcgggaaggccgaggtgggaggatcgcttgagcccaggagttcaggacctgcctgggcaacatggcaaaactttgtctctcttaaaaaaaa

SEQ ID NO: 589 - DNA, 324 bp, Homo sapiens
aactaattcaaaattctaatttaatcaaacaattcttgtttacatagaaaaattcaagaatgctgaaaacaaaaggagaaagcaacactcattaccctacctcttcatggtaaccactgttaaccctattatgctcatattttgatctttagctacagatttttttttgaaaaataggagtgttattgttttgagacttccttttttacttcagtatttaaaattatccattcacacctataaatattaatctgtatcataattttaaaggattaagtaatattccagtacacgattgaatctcaattttctgtttttacacac

SEQ ID NO: 590 - DNA, 323 bp, Homo sapiens
aactaattcaaaattctaatttaatcaaacaattcttgtttacatagaaaaattcaagaatgctgaaaacaaaaggagaaagcaacactcattaccctacctcttcatggtaaccactgttaaccctattatgctcatattttgatctttacctacagatttttttttgaaaaataggagtgttattgttttgagacttccttttttacttcagtatttaaaattatccattcacacctataaatattaatctgtatcataattttaaaggattaagtaatattccagtacacgattgaatctatttttctgtttttacacac

SEQ ID NO: 591 - DNA, 164 bp, Homo sapiens
tttatttttgagacaagagtctcgctctgtcgcccaggctagagtgcagtggcgggatctgggctcactgcaagctccgcctcccgggttcatgccattctccggcctcagcctcccgagtagctgggactacaggcgcctgccaccaagcctggctaattttt

SEQ ID NO: 592 - DNA, 296 bp, Homo sapiens
ttcttttttttattttttatttttgagacaagagtctcgctctgtcgcccaggctagagtgcagtggcgggatctcggctcactgcaagctccgcctcccgggttcatgccattctcctgcctcagcctcccgagtagctgggactacaggcgcctgccaccatgcctggctaattttttgtattttcagtagagacagggtttcaccgtgttagccaggatggtctccatctcctgagctcgtgatccatccatctcggcctcccaaagtgctgggattactggcatgagccacc

SEQ ID NO: 593 - DNA, 607 bp, Homo sapiens
agcagaactcagggtgaaagtatatcagaacaagggtcaactgacaatgaatcctgcactaattcagaactaaattctcctctggtaaggaggactttaccggttttgcttctttatagcatcaaggaatctgatgagaaagcaggaaagatcttttcacagatgaacaatattatgagtaaaagtttgcatgatgatggttttactgttccacagattattgaaatggagctggatagtcaggagcagttgttattgcaggatcctcctgtgacttacattcagcaatttgcagatgcagcagccaaccttacctctccggattctgagaagtggaactctgtgtttcccaagcctgggactttggttcagtgcttgaggctgccaaagtttgcagaggaggagaatctttgtatagactcaataactccttgtgctgacggaattcatttgttggtaggactgcggacatgccctgttgaatccttgagtgcaataaatcaagtagaggccttgaataatttaaataaattaaactctgcactatgtaatagacggaaaggtgagctggaatcaaatcttgctgtagtgaatggtgcaaatatta

SEQ ID NO: 594 - DNA, 607 bp, Homo sapiens; identical to SEQ ID NO: 593

SEQ ID NO: 595 - DNA, 457 bp, Homo sapiens
atgaatcaccagcagatgtacagactcctttaataattcagcctgagcagaggaatgttagtggtggatatttagtgctttataaaatgaattatgccactcggatagtgactttagaagaggagccaataaaaatacaacatatcaaagatccccaggacacaattacctcgctcattttgcttccacccgatatattggataatcgagaggatgactgtgaggaacctattgaggacatgcagttaacctcaaagaatggttttgagagagaaaaaacgtctgacatttctactcttggacacctggtaataaccactcagggaggatatgtaaaaatactagatctttcaaactttgaaattttggccaaagtggagcctcccaaaaaggagggcactgaggaacaggacacatttgtttctgtgatttactgttctggcacagacaggctgtg

SEQ ID NO: 596 - DNA, 457 bp, Homo sapiens; identical to SEQ ID NO: 595

SEQ ID NO: 597 - DNA, 571 bp, Homo sapiens
gtgtactggtaccatagacatacatatactcacatacacaaagacagagtgacagggcattggaagtagttgtgacagtcagctaaaggatttggggccctcagtgaatttccatgtgttctactctgccctgtgacttactggcaccaggatttgcaaatcagctagagaatgcctaggcttcagtttctctgggttctccatctttaaagctgaaccctaaaagaaggactgtgtattccagtggcccatattacaagtaagtgctctttacacctaggatcctggaaaaaggtctttttctagattcagatgaattatattaaagggcaatttccagtgatatgcccttttgtttcttggagtgaaggaggggaagtacatgatgaacctattgattattagattagcagggagctcaaagcttgtctgatgtcatcttatcttccagagggtaaatttaggaggataaatgacgagtttcagtagtcaaggtgggtgtccccagaacccatatctcttgactgagacttcagaattatttttctattccatgaatgaaattcaggga

SEQ ID NO: 598 - DNA, 314 bp, Homo sapiens
cgaattacagaaagcaattcctctggagcagcagaattgggaggttgaaccccatcatgtctaactccagagtccatgcttttaacaatgttttcccgagataagtgcgtaattaaatatatacaagatggattttagatactacagagacaagattattaaccttagtgcttatgtatttgcttaaatacatggtaacaatgctagtttttaattaggatgttaatgttttcatttcaaaatacattaatttaaataaggaaatagtttcaagaaaaatatcaactctataagagtgcagctggtacaaatat

SEQ ID NO: 599 - DNA, 314 bp, Homo sapiens; identical to SEQ ID NO: 598

SEQ ID NO: 600 - DNA, 314 bp, Homo sapiens; identical to SEQ ID NO: 598

SEQ ID NO: 601 - DNA, 128 bp, Homo sapiens
gggcgtggtggctcatgcctgtaatcccaacactttgggaggctgaggcgggtggatcacgaggtcaggagatcgagatcatcctggctaacatggtgaaaccccgtctctactaaaaatacaaaaaa

SEQ ID NO: 602 - DNA, 192 bp, Homo sapiens
gtggctcacgcctgtaatcccggcactttgggaggctgaggtgggcggatcacgaggtcaggagatcgagaccattctggctaacacggtgaaaccgtgtctctactaaaaatacaaaaaattagccgggcttggtggcgggcgccctgtagtcccaactacttgggaggctgaggcaggagaaaggcgtga

SEQ ID NO: 603 - DNA, 273 bp, Homo sapiens
gtggctcacgcctgtaatcccggcactttgggaggctgaggtgggcggatcacgaggtcaggagatcgagaccattctggctaacacggtgaaaccgtgtctctactaaaaatacaaaaaattagccgggcttggtggcgggcgcctgtagtcccagctacttgggaggctgaggcaggagaatggcgtgaacctgggaggcggagcttgtggtgagcagagatcgcagatcgcaccactgcgctccagcctgggcgacagagcgagactcca

SEQ ID NO: 604 - DNA, 115 bp, Homo sapiens
cgggtggatcacgaggtcaggagatcgagatcatcctggctaacatggtgaaaccccgtctctactaaaaatacaaaaaattagctgggcgtggtggcgggcggttgtagtccca

SEQ ID NO: 605 - DNA, 449 bp, Homo sapiens
ggccatcgtgccagacgctgtccaagcgcagataatttgactgaattagccccggcccctgtgcggggtggagagggaagtgaacctccacaacctcccctcccctgaggcagctcctggttgagcaagctcggctgactgttgggcaagatggtcgcagagcagggcccagcccggcctcagtccatttgccccttccctggggagagcccccttctgcctgtgctgagaggctcaccccgcagctgcaggcctgggaggagccagcttccaatcaaagtcgcctgctggcctaccacgcgcaggccccgtgctcaggcgacgctggaggagctcgccctgctctcgggagccccctgcccagggtctgctgtgtggccgagtggtcacaggaggcggctgcctctggctctggactagggagatgcttgaggaatgagtgtcagggt

SEQ ID NO: 606 - DNA, 496 bp, Homo sapiens
gagaaaagaaagagacagacacagaagcaaagcaaatgtggcaatactttcaaaagacccgttaagttagatgtgtgagatggctacactgtacatgtgtgtaacactgtattaaagaatgtaaagctaacacaagtgaaacagttcaaaagaaaaagtcagaggaccctaatgactcaatcactgcggagggctaacctggctgcaccctagaccaaccaaatcataatttctggggctagaattcaggtatcagtattttgtaaagctcctcaagggatctaaaagtacagccaagattgaaaactacttgccaggcgtggtggctcatgcctttaatcccagcactttgggaggtcgaggtgggacgatcacttgaacccaagagttcaagaccagcctgggcaacagagagagacccccatctctacaaaaatttttcaaaaaattagacaggtgtgatggtgtgtgcctgtagtcccagctaccgcagcag

SEQ ID NO: 607 - DNA, 423 bp, Homo sapiens
agtgaaactgtctcaaaaaaaaaaaaaagaaagaaagaaaacacccctggctgcaggcttcgggcggccctgtgtcctccagctcttggggtggggccactctgacatcatgtgctgttttggggagtgtcatgaccaggagggcatcttttgttttttcttttaattaaaacaaatactaggctgggcatggcagctcatgcctgtaaccccagcactttgggaggccaaggcgggtggccttgattgcttgaggccagaagttcaagaccagcctgggcagcatggtgagacctggtctctacaaaacaaatacagaaagtactgggtgtggtggcatgtacctgtggggcgggaggatggcttgagcccgggagttccaggctgcagtgagctgtgattgtgccaccgcactccagcctg

SEQ ID NO: 608 - DNA, 423 bp, Homo sapiens; identical to SEQ ID NO: 607

SEQ ID NO: 609 - DNA, 421 bp, Homo sapiens
agtgaaactgtctcaaaaaaaaaaaaaaaagaaagaaaacacccctggctgcaggcttcgggcggccctgtgtcctccagctcttggggtggggccactctgacatcatgtgctgttttggggagtgtcatgaccaggagggcatcttttgttttttcttttaattaaaacaaatactaggctgggcatggcagctcatgcctgtaaccccagcactttgggaggccaaggcgggtggccttgattgcttgaggccagaagttcaagaccagcctgggcagcatggtgagacctggtctctacaaaacaaatacagaaagtactgggtgtggtggcatgtacctgtggggcgggaggatggcttgagcccgggagttccaggctgcagtgagctgtgattgtgccaccgcactccagcctg

SEQ ID NO: 610 - DNA, 396 bp, Homo sapiens
gccatcgcagtccccgaggcgcgcttcctgaacgtgattgagcgccaccctgtggacatcagcgccatccccgagcagcggtggaagctggtaggtccttgcggtcgaggcccaccctgcccgtgcctctagggctgccggccatgctcggctccccacctgcgcgatctgaagcggtctttcctccaagctctgcgtctccatgggggtggtgggcagctttcaggaagccagtgaccccgacttcagcaggtgtgttattttttgaatccttccccgaggtgcaaggtacaaaaatcagaaggcatcaagggtggcagagataagcaggccccgtcaggtgtggccttgggggcatcctctgcagaatcgagcaccccatgcagtttccacctt

SEQ ID NO: 611 - DNA, 530 bp, Homo sapiens
gggaagatggaaatatctggatagattcctaaaattaatatgtcatttttgcccatatgggccatcctattctctgtttcagttttattaatatttcatttattttagagtattttgagtctttttcttttctagaatttttaaagagactataggcatcatctagtctgacatgattattttctaggagttagaaccagagcctagagagatttagtgacttcagacgaagaaactaattgcttcttataaagtgtgatatccagaccagcagaatcagtatcacctgggaacttgttagaaatacatactctcaggttccactccagacctactgaatttgatgtgtttcagcagtctgtgtgtttaaccagccttccagatgattctgaagcatgttcaagtttaggaaccactgttacagctcattgattctttgtgcctccatcactaatcaaggtcactgttctagagagcagctgttattgatgcatgtgttttacctcaggggcctttcagtaaaaatcagt

SEQ ID NO: 612 - DNA, 601 bp, Homo sapiens
tttttcagcctttctaagcttttattgatactcctgtaagtgtttgtggcaaatgtctgggtttaagaaaaaccatgaaataaatattataataaaagaggttatgccttttccaacaatgttttctaatcattttattctgttagttattgtgagattctgtaatctgtttctgaaagcccatttagttgattgtttgccagatagtttttatattttagaatagattgcatgcacacttttcctcatagagtcttatatttctgaagtattttggtgctttcaaataaccttatagtaataaatgtaaattacattgctatgattttccatatttattaatgataattagtattgttgcgttcatggtaacttgaaaattgccttagttcttctatttagttttcaaactgatggcagtttgcatgaacacaatttttcctaatgtctgtatttcagaagaatgcatgagtgtttgttttataaccagatttgtttctgttttttcagaagtcatattttaattcctgcaatttatttaatggaattatcaatatcttttgcatgtaagcctataggtttcattaaattcaaaaagcaa

SEQ ID NO: 613 - DNA, 565 bp, Homo sapiens
tgtaattatccatacaaaagcctgtctccctcagtgggttcttagctccatgtgggcagggaatgtggctattttccacccctgtatccccctttgcctagcccagtgcctagctcatagtgtatgctcagaaaaatagccactgaatgaatgggctgagcgtttaagtgaggggaaatatcaagatgcaggatcataatacacaatcttcattgccactagccatgtgtgactattaaaatttaattaaatagctatacttacccataatctatgcactctgtagccacgtggggctggtggctacgatttgaatagtatagattatagaagatcatcacagcaagttctactggacagtgctgatataggatgattgtacattcattttcaaaactatccctatgcttggcacaaagtaaatacttaagaaatgtttgattgaattaatgagcaaataaacactgtatctccctctcttattcttgagctacacgttttgatgtagaagttgcttgtaccaaatagccaaacattctcttaacttgcctaacacattacattt

SEQ ID NO: 614 - DNA, 565 bp, Homo sapiens; identical to SEQ ID NO: 613

SEQ ID NO: 615 - DNA, 13743 bp, Homo sapiens
acgcccggctaattttttgtatttttagtagagacggggttttaccgttttagccaggatggtctcgatctcctgacctcgtgatccgcccgcctcggcctcccaaagtgctgggattacaggcgtgagccaccgcgcccggcctgtccacctatattttcattttttttttttttttttgagacggagtctcgctctgtcaccctggctggagtgcaatggcacgatctcagctcactgcaagctccgcctcccgggttcacgccattctcctgccttagcctcccgagtagctaggactacaggcgcccgccaccacgcccggcattttttgtattttttttagtagagatggggtttcaccatgttagccaggatggtctcgatctcctgacctcgtgatccaccctcctcagcctcccaaagtgctgggattagtgctgggattacactcgtgagccactgtgcccaggccactttgctatttcttttaacaaagttgtactcaatacaactactgttgttttgtatttttaccttattatattacattgtatatattgtccttacaaattacttttcttgtttttcttttatatttattagagtagcatattaagttttgtagaaatcatatgtggatttacctatgacttatctattaattaaattcaagcaaaatatttgttataaaaaggagtcactgagtctcagagaattgagaatcattaggatcactggacagtgcctggaagaaaggacttcttatgcctccttcctcagcacccttagtgagtggactgagggcagcagatggatgagctaagagaggccaaaacagcaatggtggggggtgcggggcgtggggtggggagggcaaggaatactgacagcaggatggtcaggtcccaaggtgctctcccggatgctaagggcatcattcagcaggtgggcagcttccttatacttattctggtcactggaagaagacaaaagtgacaggagttaccctgaacccgcaagccttctccttccctccttccctttggaaggactgagtacatttaaggattggagacctccatgaggagacaggaagcctggcgtggacagtaagggggcttcactgacatactcataccagaatgcagggcactgccatcccaagaggaggccacaagttataagaagcaagggggcagggggaagagagggagagagcactccccagaagagagattagaggaacaaggatcccaagggatgagcaaatgcttaggtatgggaaaagtgagagttctggcacataaagaagcaccctgttggggtgtatctgggaggcccaacagggaggagaggtaccctgtaaagaggaaaaatgaaagccaaaggaggaccaaggtgggaatgtgggggaagatctgggcactggaggagggaagtcctcaccgatacaccaaagcaaggatgttgagcatggtggcgacatcagggtggccacggcctgatgtgcgctccaggtcctctagtgcctgcttacagagtggcacggccacctcatagcgaccttgggctgcgtactggatcaccaggttgtgcaacgtccgcaaccttgctgggatctcatatccaccctgctgagctgctgtagcaccttgaccacgggacactaaaccatcacagaacataaacaaaggactcttcctctcccctttgctgtctgcccttccactccccattgcatgtcttgttccatacttgtgcccaccccaacctggactctcaatattagacctgcctcaagtgctattcttttatccactcccttgacctatgcccatcacaacctcagttgttcacccagtaattcatgcattcaacaaacatttatttaataagtatgaaccaagggatgttccaggagtacaaaggtaagaaagacctggttctttcccttggggggctcatggtctccctgtctcaggtttattctcccactagactgtgaactccttactggtaagacctatgccatttccatctcagtactcctagtgcctagcacagtacctggcacatattcagtgcttaatacatgttcgttcaatggggaggctgaggaaatcgaagtactagcccagcccctgccctgtctccagagaaagtggagaacctatttctagatggtgactgtcctgtgtacagggtgggccacagctagggccagcctcctgctgccccttttcaccctcccattccagaggcagactcacagccattgctggggtcctcttcctcctcattaggaaagaggtcatccagggaatccttggtggcatcgccttctttctcctcctggaagggaagaagcaacatataagggccaagatatccctacctagtagccttctcagtgacccctctaagccatgaaatcacagacagatgggacctaggagaagactgttgttcctgtctctgcccctggaaaggctagcaagtggcccagccaagctcaggcctcttgtttgtaacagccagagatgctttggacaaaatctcaagacttcccctccttctcatacagaaagtttccttcctggccgggtgtggtggctaacgcctgtaatcccagcactttgggaggccgaggtgggcagatcacctgaggtcaggagttcaagaccatcctgaccaacgtggagaaaccccatctctactagaaatacaaaattagccgggcgtggtggcgcatgcctataatcccagctactcatgaggctgaggcaggagaatcgcttgaacctgggaggcagaggttgcggtgagccgagatcatgccattgcactccagcctgggcaacaagagcgaaactctgtctcaaaacaaaaaaaaaagaaaaaaaaaagtttcctttctaaccaccctcaatcttgccttaactcttgtaattatggccctatgctgatctctgtgtgtttacgttgattgtatgtctgtcctgtctctcctgagggaagggagtgtggccgatcttattgacatgtacccagaaagtgtctagctcagcctggtgcccatcatctgcacagctcattctggacttactacgtaaccctccctcactgtctaacctattccgcactaggaaaatctgcttttccccatcaggaactgcagcctcatccaaacaccaaccctcctacccagcttcaccaatgtgtcctatgcaattcatctactcactttccctgggacagaccagcttttccaggctgtaagccttatcaatgacaccctgcactccagtctaaaaagctgctccctcttcctcatcatgaactttcaaaatccatctcaactcctaacccactcaaatgggaaatccaacctatatcctacccatccctgtatcctgcttcctctatttttttgtttgttttttgagacagagtctctagtctggcaacagcccaggctagaatgcagtggcataatcacagctcactgcagcttccacctcctgggctcaagcgatcctcccacctcagcctccagagtagctgaggctataggtgcacacgaccacatcaggctaattttttaattttttgtggagacagggtctcactatgttgcccaggctccctgcttcctctatgaattcttcttagaccattccagccctcagagacatttctctgtgaaattcttcccacactgactgaaccactcatccagcactgagcacttgctgctttgtattttgtcacatatatgttctcctggataagacttgttccctacagatacatctcaagaaaacacacactctcagccaggcgtggtggctcacgcctgtaatcccagcattttgggaggccgagggcaggcagatcacttgaggctaggagtttgagaccagcctggtcaacatggcaaagctccatctctactaaaaatacaaacattagccgggtgtggtggcagacacctgtaatcccagctacttgggtggctgaggcccaagaattgtttgaaagccagaggcggaggctgcagtgagctgagatggcatcactgcattctgttgagcgagggttaaatttcacacattttggaccgggcatggtagctcacacctgtaatcccagcactttgggaggcccaggcgggcagaccacctgaggtcaggagttcaaaaccagcctggccaacatggtgaaaccccgtctctagtaaaaatacaaaaattagccaggcgtggtggcaggtgcctgcaatcctagctactcaagaggctgaggcaggagaattgcttgaacccgggaggcggaggttgctgtgacctgagattgcaccattgcactccagcctaggcaacaagtgtgaaactccgtctcaaaaaaaaaaaaaaaattcacacattttgaaagcaaattttaggagggtcatgctcaactgggttatgctttccctaattgtaccacgtagaattctggattggaattgtccaggtgcttatctatctccctcacaagcttgtaattgtgagagcaggaactctgtgtgccccattcaccagtgcagtgcacaatgcctggtacacagtaggcatctcattaaatgttgactgaattacctgaatattgtttttccccttgctgtcacctggagttggtgtcagggctgaaaaaggaattctttcaggtgagagcaggttgggtagagctgatggaccctgaggatgatggggcaattgcccccatgtctgtggtaactcccggctgcccacccctcagccagtctcgcctgtgcacactcaccgaggtatgtccatcctcatcatactgccgcagctgccccaggaactccaggtgcttcttttcctcctccagctgagccacagcctgttcactgcgctgtagccgctgctgggtgccagccagctcatcccgcagccactggttctcctggcatagccgccgcacctgagcccgcagcttctgtttctccgactccactgtgctcaggtggctggctagagccagcatcacctaggtgggcacatcccctgagctccagattctgggtgggagtattcaggaacaggtggaaggggagcctactgggacgtggcaagactggcaggggcacagaggagccagaaggtgggggtgtagcagtggtgctaccttcaaaacataccctgaatccaatttcccactacctccactgctgtcaccctggaccaagccactatcaattcctacccaaattattacaataacttcctcactggcctcgtttctgcccttgttcccctattgtctatttgtaacccaacaacctgatgatgccaagttagaccacatcactcctcttctaaaaacattccaatagtttccatctcgctcaaagtaaaatcagggccaggcacagtggctcacgcctataatcccagcactttgggaggccaaggcgggtggatcaagaggtcgggaattcaagaccagcctggccaacatggtgaaaccccatctctactaaaaatacaaaaaattagccgggcgtggtggcatgcgcctgtagtcccagctactcgggaggctgaggcaggagaatcgcttgaacctggcaggcagaggttgcagagagccaggattgtgccactacatccagcctgggcaacactgcgagactccgtctcaaagaaagggcaaaatcaaagtcctcggggtggcctacaagttccacttgatccatctccctcccctccaaccccattacccctcagacttaattttctaccttgcttctcctcattcactctactgcagccatactggccccttgctgttcactgacctcaccaggcagacttccattcagagcctctgcacttgctgctctctgtgcttaggatgcccttcccctgtttatggcatgactcattcccctcaacttcacgtctttgccaaaaatgtcaccttttcaaaaaagggtggccttttctgaccaccctatctaaaattataccctctccccacagtccctagtttccttccctgctttattttgatccttttatgcttagcaactatcactctggcataccgaatcattatttatttatgtattgtctgtcttcccaagctagaaggtaacctccaagatggcaaagatttttacagttttgttcaatgatgtatctcttcagtgcccaaaagcattctggcacacagtagggacttaatacatatttaatgaatgaatgcaaacgtctagagtgaggtgatcccaagcagccccaaacctttaatcagataactgctcctccatccaccctggaccacttggcaccacctttgccctctcacctgggcctcactcagcccgagctcaatgttttccatagaacggcgaagctgccgggccttctcatgcaccagcccttcctcatggcctccctgctgcagacactcaatggtctgggacaggctttgcagcacggcctggtgttcactgcgtagggcctctagcccttggctgaccagccgtgtgctccccaggatctcctcttggctgagccggtggcctgcaggctcatcccgctgccccaacaccaggcctgacatcctggcctgggggaccttgcccggtctagggagaaacaacagagttcagctggtgtaaagatgagacagagaagctgagcaactttctcagagagtggtgggaatccaagtgaagggacaaaagtaagagtgaccctgtggcttagctggagagagagagtgaccagcaggcagggagcttagatcactaaactcaaagctaaggttgtgggcaaagcgagagggagatgaactgacttaaataaaggaagactatagtaggaacaaaggtgcttagaactagcagaaggatttaggacttaggaaaagaacaaaaaagcagttacagcctgagttaggaaaaggaatcaagggatgagagacagcactatggggatcacagaaggtctgtgggagagctgcaaatggcacagggttaaagtgggagatatgcagaaaataatgcaggggtctagaaaaaacggaaggaatctctgcaaagttaaatcagggaagaaagggaaaagaagaaaacaagagccttccttgcaggatccacattacagggtcccagaaagctcaaggtcttcaggctgcatcacctgcagaactaagcccagcatctccaaacctggtcagccctgcatattttcccactaaccttcaacccatacttcccaccccccaggactcagactgtgttcccacttcctcagaggggtcttgtttctcatctttgaagccttcttacctgtgtacagagcagaggccctggctgtggcactcaggccagagcacggaagaaactgttctgcagccagagagtcagaggatctgccctgcccaaagtccagaagtccagcgttcccaccccttctttcaccacttcacagctacccagaggacctggcccagagccccacccaggacaaacaccctccctccctccctctgcccacaggtcttcaaagacgcccaattcccgtctccttccccaagccagcctccctcattgcaggcctagggagctactgtctcccaggaagggaatgagagagagagacttaaccagagacctacagcaagaggcgtgtctgggaaaggggagggaggaacacctggtcactccaaacccagtcacttccatggttttgtctctgtcacggtcacctacaaacaggctctgagaggaatcaccgtagggtgcctccacaatgcccgatgatgcaggaaagaatgggaggtctgctgaacggctgccgggtcgcaaggaaccgcggcgctggagtgggtctcctgggcctggaaacgcagtagaggagtgcctcgggctgtcgacctgccctggtgcccagggttgggagagtgagatgggcgggggcggcaggggggaggtgtggatggacgactgaggtccgcagctccagcgaggacgtggaggcctaacgaccccgaggtcactgagtcagtcggtggcgcagggggcggggcaggtcgtctgtctatctgtctggacgccgaggggccgggcaagaatcgcgaagggcggagttttggaggctggagttttgtaaggttggtggagggggtttgttcatctttctggtagtgcgagaataatagatggcagagaccttaaccttcagccccaggataccctcaaagactcacctgcaatctgccggtgtggctgccgctcttgccggtactgcccctttaaatccatgatggctgccgctcgaggcaattgttttgacgggtctgggggggcggggcctgtttcctagtcacgcgacattagagctgcccgcggattggctctcacggcgttcaggtaggaaaggaggtgtgtatccagcttgggctccagttttctgcccgcctccttttacgttattgcggagcgacggcgccggacagtcaacgtcatctaggagcaccgagcagcttggctaaaagtaagggtgtcgtgctgatggccctgtgcgcactgacccgcgctctgcgctctctgaacctggcgcccccgaccgtcgccgcccctgccccgagtctgttccccgccgcccaggtaatccatcttacccgggaagaaggctgcttccattcgggctgccggagatggggtctgcgggcatgcgaggcgggagttgcgagtctggtcaggagtcatgcaggtccgtgaccttggataaggcacacttagcctcagctttttcctctacaagtgttgctttctcatagggcgaaattcttcagacgagatacttaaggtgaaagtgctttgcagatcaccggttgtgcaggtttcagtaataacgtttcgagtgcctatgataagccaggtataggtaatagacgtttcaaataaatgaactcctttcaaatactctataaggcagttactattcccattttatagatgaggaaaataaggagtccaaggtcacacaccaactatcagagctaaacagtctgtctttcagagcctgtgctcttaaccattatgatatgatgcctgcaaggatgagttactgctgatattagagaatgcagggcaagataccaagaacagtggcctcaggggaaggtatcctgaggtcctagtgggtgactggtgagtcacacaaaagagaagtaagtcctgctcctctggagctttcaggctgcttatggtacagtttgggagatgcatgtttaaaattcaaatccaaatcaacctactccgaaatgctgggaatacatcaaggaacaagagtgaaatgacccctcccctccattcatatgtgaagaattcccagaaacaatgcagagggcaaaaggaattggcactgatggtggtacatggatgtgtggaagctaccagctctggagaagggaattgtttaggtaaaaacagattcctggagatggagagttctgagccaaatttggaaggagatcaccaaggagagaacattactgtgcaagctgtgaagggtggagtttttggatagctggtttgggatacatccaggaggaagtgggctacaagctaaaattgatctgtgccctctgccttggttctctgatgctttgccttcaattagctttcaaatgaaagagatgtctttttatccctagatgatgaacaatggcctcctccaacagccctctgccttgatgttgctcccctgccgcccagttcttacttctgtggcccttaatgccaactttgtgtcctggaagagtcgtaccaagtacaccattacaccagtgaagatgaggaagtctgggggccgagaccacacaggtgggaacaaggacagggggatttaagcagtcaaaaggaaaaacatgttaagaccctagacttgtatattgacacacttgtaccttgtaaggcagaggaatgtaattaaaaagcacttatttggctccttttgcatgtagtatgtgtacaggagtcagagagtagaatacaaagcaataggtaattggtctatgcttctaaagacaatttgggtaattgaagaaaatgggccatacacaggaagtgccatgacattttccttcatacccttcaaaaatttataacaggctgggtaaggtggctcacgactgtaatcccagcattttgggaggccgaggcgggcagatcacctgacgtcacaagtttaagaccaggctggccaacatggcaaaacctcatctctactaaaactttaaaaattggtcaggcgcagtggctcacgcctgtaatcccaacactttgagaggccaaggcaggcagatcacttgaggccaggaattcaagaccagcctggccaacatggtgaaaccccatctctataaaaatataaaaattagccaggtgtaatggtgcagtcctgtaatcccggctacttgggaggctgaggcatgagaatcacttgagcccgggaggtggagggtagaggctgcagtgggccgagatcgcgctgctgcactccagcctgggcaacagagcaagactgtctcaaaaaaaaaattaaccaggtgtggtggtgggcacctgtaatcccagctactcaggaggctgaggcaggagaatcgcttgaacccaggaggtggaggttgcagtgagccgagatcgcaccattgtattccagcccaggtgacagagcgagactcatctcaaaaagtatatatatttataaccggccgggtgtggtggctcctgcctataatcccaacactttggaaggccaaggcgggaggataactttaggtcaggatccagcctgggcaacagagtgagaccccatcacacacatgcaaaaaatttataacagttgaaattatttaagtatgatttacatggctctcagtaaacttactgatttcagtaatttgaaaatattttggctgggcgcagtggctcacgcctgtaatcccagcactttgggaggccaaggtgggcggatcacaaggtcaagagattgaaaccatcctggctaacacagtgaaacccgtctctactaaaaatacaaaaacttagctgggcgtggtggtgggcacctgtagtcccagctactcgggagactgaggcaggagaatggcgtgaacccgggaggcggagcttgcagtgagccgagatcgcaccactgcgctccagcctgggcaacagagtgagactctgtctcagaagaaaaaaagaaaatattttatctggaagttttatacaatttcaataatcatataatgtttttttcaccaagcttcatgttggtgttgcccctccttactccagtgtgctgtgcaaatttttatcatttctgcttgtgccacaatgctaagcactgctctctggcagagaatgggccagttcccagtgctggaaactaaactactctgacctgaatcatatcccccaactgtcctaaaccacaggccgaatccgggtgcatggtattggcgggggccacaagcaacgttatcgaatgattgactttctgcgtttccggcctgaggagaccaagtcaggaccctttgaggagaaggttatccaagtccgctatgatccctgtaggcaagtttgggatgtgggatgatgatggaatggtctgaataactccatagcttctcagaagatgtggggctgcctagacggtctgcttacctgtccctcaccctgattaggtcagcagacatagctctggttgctgggggcagccggaaacgctggatcatcgccacagaaaacatgcaggctggagatacaatcttgaactctaaccacataggccgaatggcaggtgagagatggctaccagatgtgtgggctggaggcagcaaaagttctagagctaatgaaatcctgtcttttagttgctgctcgggaaggggatgcgcatcctcttggggctctgcctgtggggaccctcatcaacaacgtggaaagtgagccaggccggggtgcccaatatatccgagctgcaggtatggggaaaggagttgcctgggtcctatagtttggaaaggcaaggagagtctgaacccatggttccacatctggtactggcagagaaaattaaggaaaaaacaaacatgaggatgaagatatgcatgtgtttttacctaaaacatagcatgcgtccttctttgtgtatctgctcctaaagagcaaagcaagggcagcatgtggggtatgtcccctgtgtaagtccctctgcacccccctgttttgtggagggtggcaaatcagcttctttccccagggacgtgtggtgtgctactgcggaaggtgaatggcacagccattatccagctgccctctaagaggcagatgcaggtgtgtatgggtatggatgggaggggtcagcaaaggaggaatttttggaatgtaactttcctgtctgggatagctcccaggtgttttatgatgcaaggaactgccttgagctgaggctgtccttttctgccacatgactcaggtgtgctttgtcggattggcaccataattaattttttttttttcgagacagagtcttgctctgtcgcccaggctggagtgcaatggcacgatctgggctcactgtgacctccacctcccaggttctagcaattctgcctcagcctcccgagtagctgggattgcaggcacgcaccaccacagccagctaatttttgtgttttagtagagatggggtttcaccatgttggccaggctggtctcaaactccttacctcataatccgcccaccttggcctcccaaagtgctgagattacaggagtgagccaccacacccggccctacttaattttttttgagacagggtttcactctattgcttgagtgcagtggcacaatcagctcactgcagcctcaaactcctgggttcaagcaattctgcctcagccccccaagtagctgggactacaggcgcacaccactccaccaggctaattttcgtattttttgtagagacagggtatcaccacgttggccaggctggtcttgaactcctgagctcaagcaatctgcctgcctaggctcccaaagtgctggaattacaggtgtcagccactgcacctgaccctggctaatgttttttatttttgtagagatgggatctcattatgttgcccaggctggtcttgaacttctgagctcaagtgatcctccagccttggcctcccaaagtgctgggattactggcgtgagctctttgttttcaactacttagttcctactgtaggaccttcacttagtgtcagccatcttatgcttttccttttccctcgcccttctctccttgagtctaagaagccccccaagggtgtgctctcaacattgtcaagctctttcccccccattgtacagaatctccatctgttttctctgtcaggtgctggaaacgtgcgtagcaacagtaggccgagtatccaacgttgatcataacaaacgggtcattggcaaggcaggtcgcaaccgctggctgggcaagaggcctaacagtgggcggtggcaccgcaaggggggctgggctggccgaaagattcggccactaccccccatgaagagttacgtgaagctgccttctgcttctgcccaaagctgatatccctgtactctaataaaatgccccccccccccgttttaa

SEQ ID NO: 616 - DNA, 1027 bp, Homo sapiens
gtttcaccatgttggccaggctggtcttgaattcctgacctcaagtgattcaccctcctcagcctcccaaagtgttgggattacaggcatcatctactgtgcccggagcagaataaatttttaatatatattttgataggctgattttcttgcatctcgatttttcttgtatgtcagtaactggaatcacagttaccttttgagcacggtgctcacattatgagagttgagaaaattacggggaacaaactctggccttatggtgattctggttagacttgagatctctaaattgatatttttaaatgagaatatataatacacagactaaaatatacattttaaggttaaaaaaagagaaactgtttactaagaatgtttagtagattcagttttcttagtgtttaatactagaaaatacacagtattggctgggtgcgtggctcacacctgtgatcccagcactttgggaggccgaggcaggcagatcatgaggtcaggagatcgagaccagcctggttaacacagtaaaaccctgtctgtactaaaaatacaaaaaattatccgtatgtagtggcacgcacctgtaatcccagctacttgggaggctgaggcaggagaatggcatgaacccaggaggtggggcttgcagtgagccaagatcgcaccactgcactccagcctggtcgacagtgcaagactccgtgtcaaaaaaaaaaaaaaaaaaagtattgatagcatacttttaagaaatccaaatgtctttgtaaaagtaggtatttttcattctttcagtatcagttactcttcactatggttctttttcacatttaaatagaatcaaggaaccttttatctttggtttatctggtatttttcagtgttagcaattttgaaattctctaatttttaccacaaacatttttgactctttcattcagcttataatctgaattgacagaaaaatccagggagaaaagttaaaatacttcctaaagttaaaatatttgctttatttagatttcta

SEQ ID NO: 617 - DNA, 1027 bp, Homo sapiens
gtttcaccatgttggccaggctggtcttgaattcctgacctcaagtgattcaccctcctcagcctcccaaagtgttgggattacaggcatcatctactgtgcccggagcagaataaatttttaatatatattttgataggctgattttcttgcatctcgatttttcttgtatgtcagtaactggaatcacagttaccttttgagcacggtgctcacattatgagagttgagaaaattacggggaacaaactctggccttatggtgattctggttagacttgagatctctaaattgatatttttaaatgagaatatataatacacagactaaaatatacattttaaggttaaaaaaagagaaactgtttactaagaatgtttagtagattcagttttcttagtgtttaatactagaaaatacacagtattggctgggtgcgtggctcatgcctgtgatcccagcactttgggaggccgaggcaggcagatcacgaggtcaggagatcgagaccatcctggttaacacagtaaaaccctgtctgtactaaaaatacaaaaaattagctgggcgtgttggcggacacctgcagtcccagctactcgggaggctgaggcaggagaatggcatgaacccaggaggtggggcttgcagtgagccaagatcgcaccactgcactccagcctggtcgacagtgcaagactccgtgtcaaaaaaaaaaaaaaaaaaagtattgatagcatacttttaagaaatccaaatgtctttgtaaaagtaggtatttttcattctttcagtatcagttactcttcactatggttctttttcacatttaaatagaatcaaggaaccttttatctttggtttatctggtatttttcagtgttagcaattttgaaattctctaatttttaccacaaacatttttgactctttcattcagcttataatctgaattgacagaaaaatccagggagaaaagttaaaatacttcctaaagttaaaatatttgctttatttagatttcta

SEQ ID NO: 618 - DNA, 1352 bp, Homo sapiens
ctttccgctgggtcgggcggaaatgagccgtggcttttggctggcggagccgctggcagggaccgggccccaccctgccccagtggctgccgactcacgcgggtgcagctctgttccgcggaggcacgccccctcccgtctctccgtctcgaccccctcgcggggcccaggtggggcccaagtcgccgccagcgtctgtgccgcgtcccttgctctgtgaaggacaggcctcgcgccaggaccccggtggacttctgaggtggccagagccccaccgcggccccttgcttctccttccctgcccactagcccatcgagcctcgcgctcacccaacctcggtccccatcctaccgtgcctcggggttctagcttatggggcctaatcccctctcccccaccttaccgcgcgcccctggcttctccagtctccaacctcggtccccaagcccctcgcctacctggtctgtgcaccctgccctgggtctcgcggcgccctcaccagccctcttgttccagttgctccagtcggaggcgcctccaacccaccagtgcctcctcctagtccatcgcgccttgccctcccactccaccaccagttctcaggtctcttaactctgcgatctcgggactcttaacttgggtctcgcactcccatgctccaatccttagagacagcaccccttttcacacacactcacgatctccctcccaaacatacccctctgggcttcacataccccataggttgctgcctgttccaaggccttgggattcacttgtaactccaaggctgccctgcccccactagtccgcccactgttccatatcaacccactccaggccacagggtcttggggaccttccttttagcccccaaattttgtgttctttcacaacaaacaccccagtgttctctgcttaggcctgcccccacccagcgtgcagcatgcaactcctgggcctggctttaccccaccccgcctgacagctgttgccatttgcttccccacctcctggatatctttgattttctgacctctccttcctctagcttgtctgttctcttttccttgtgtgctccaggtgccaggatggtgggagaactccgctacagggaattcagggtgcccctggggcccggcttacatgcctatcctgatgagctgatccgccagcgcgtgggccatgatgggcatcctgagtaccagatccgttggctcatcctgcggcgtggcgatgagggggacgggggctctggccaagtggactgcaaggctgagcacatcctgctgtggatgtccaaggatgagatctatgccaactgccacaagatgctgggcgaggatggcca

SEQ ID NO: 619 - DNA, 216 bp, Homo sapiens
cactttttgcagtgtgaaattgaaaaatcaattgtttagtttttaccaaaggaaaattagagttttgtatacatatttgatgaatacagtaaacaggttaaaatttagcaaatagaattttgtaagcatttttaaaatgtgtgaattctgtgataagggggtggctttgctacaatttattacaaagctaagttatatttcattacttatgtaaaa

SEQ ID NO: 620 - DNA, 599 bp, Homo sapiens
aagaaaagttacctggcagcataagatagctatgaagaatctttcccccaccagaaagaagtttagcaaactattttactgaataaatctaagacttcctccttcccagtagttgcccacaattttcctccaatatgagattatgtctctattttgtaattctgctcagaaaacctgtcttaaaatctacacatattaaactataatatgtcataaattttaagaatgttatttaacagaggtaaatttatcatgaataccatatatttaaggtagcaaaacataaagagagtaataacctcttttgatactcaacagcagaccaggtaaagtccaaacagttctgtctcatcaaaataatgaaggttgcttgtctttgacctcttttcctgttacctctttaagagataacacacatatacatacgcttttgtagatgagaccattctaaaatttataaattgtgttgtatatctttgtctgcctgattaaaatggcttgtcttaaggtaacactgaactgcttagtctttcaataggaatttatttagcaactactttgtggtattgttttgatatactctatttttgtgtttcggc

SEQ ID NO: 621 - DNA, 216 bp, Homo sapiens; identical to SEQ ID NO: 619

SEQ ID NO: 622 - DNA, 599 bp, Homo sapiens; identical to SEQ ID NO: 620

SEQ ID NO: 623 - DNA, 421 bp, Homo sapiens
ctagtttctaaaattcatgaatgaaggctactcttgctgagggcaccctctaccttcccactgtcctttcagaccccctagtggctgacccaacacaaaggtcagaaagtcctcagaagcctctcctggcacctggcagtgagtcagggctggttaaatctggatgaggatagtgcagcctggagggctttcctcggagatcactgcactcactaggtccaccctctctcccagatactaggaagggaaaacatgccaagtccataaaacaatagcaccatcaagtgtctattaaacattcaaatgttcatggggcagaacactgagcatagacatagcctctcttctctctgccacctagtaacacaaatgtgacacagcagccacatctgcagcgctatgtgaaatgttccaaagatta

SEQ ID NO: 624 - DNA, 6111 bp, Homo sapiens
tataaactgtctctgagtgaaacatagtaagaagtagacaagaaaacaacatacaatagataaacacatttacccagaatttatagctttcaggtatcattaatttatttataattaaaatgtttttgaatttttggggaaatattctgtatgtagtcgtgatgacataaaacttgtttttgtattcctctagtttcttaatcatacagaagtcataagtgtacaagagtttggtgtcattttatacaggaagagctaattatttagtggctcagctaacaatgggggatttcgtctgtatagctcgtactttggaaattccattttctatctgattatacagttataaaatgtcaaccagtgtagctatcatttgaattgaatttcccaaagatgtgataggcacatctaactgaatcaccatgatttttgatactcttccatagaagataactatcagttcttttgtgatttgtaacccaagacagaaaatgctttgaaactaaaaaagtgttgtatacttagtcttcagatcctgacctgaggcgatccttagataagcaacctactgatagtggaggaggcatttatcagtatgataactatgaagaagttgctatggatacagatagtgaaaccagttctccaggtatgagccaaaacttgaaacctttgtgtatttacatgtattaaatagagaatagtcattatggtactcaaaacctttaaagaaatgtgtaatgaaagtgagatttgctgatgaactgtatggcgatagacattatttgttgttgtaaatacttagagagcaaacctcaaataagtaatattaacctttatttccgagtgtttctagatagcctttaaattaaaaaacaaataaataagacattgtttaaactctgttaactgtttgctctagaaagtgaagattgggccgggtgcagtggctcacacctgtaatcccagtactttgggatgctgaggtgggcagattgcttgaggccgggagttggagaccagcctggctgacatggcgaaaccctgtctctactaaaaatacaaaaattcgctgggtgtggtggcatgtgcctttaatcccagcttcttgggaggctaaggcatgagaatttcttgaacctggaaggtggaggttgcagtgagctgacgtcgtaccactgcactcccgcctgagtgacagagcaagattctgtctcaaaaaataaaaagtgaagaatgggaaagatgagaacactactctttaaaaaaacaaactcttgatctttatatccaagatactttctgctttagtcaaagaacaaaattccttttttgctatttggcttcctgtctctttctagtacgataatttgtagaaattttgagacagaaagtgatagtactagtggcatctcaggaaaggctggttagaactggtcagggctgtaactctcctttaggttgcatagtctagaatctgacttatctttgagggccagagacttgattttgttgatgttcaggggtgattggctgtgagagacctattccttcacaaataatttaaaacacttaagactgaggcagataacagaacgcagttggcattccaggaactggagaatttggaagaacacatgatcagtgtatttctccctatagtcacatagtgagaccaaatcaaaactggaatcctactttggtgtatctagactagagacaaaacaaaatatgtattatttggctagtgtttaccaaaatgctcatttttcaggttgttactttaagctggtgtttgatagtcttatattatgttttgataacacaatttaacttgctttggtcaatctttaattttcttattttcagattcttggagatgattcattataattcccaagtattgacaatattattaatactttatttctataaaataactttatgatctatgctttttaaatgattttgtgaaacatatagagaacatactctctaagcggctttgtcaaattttaattttttgccacgttaactgcggatatttatatatatgtatttttttccattcaagatcaatttttttctcaaattttgccaacacagacatattatatttgaagaaatgtgcattaaaaacatcttttaattcactttatcttgtattaaaaaagaatgttttccatatagagtttttcgccgggcgggggaaaaaaaaaaccaagagaattcaaatacggtaaaaaactagtttaggatctgaggtttcaggcagttcagaaattgccagaaggttatttattttttttcactaggataccacagtggcagaacaacttaaaaatcagaatactaaaatgatggggtggtcccggcagctgcccctggccagctggagcacacagtgccaccaaggtagagaggccagaggcagtgggcatcccagtgccagcctgcccgttccctgtaatgaaagcagagcaggaactgcagttgcatggccttgggggtgggtggacttgtggaaagccaagctctgaggctgcaaataccttgagcaccactggtggtcccagagcaggttgagcctgtatctgcacctctgttccaaccagccttctggcacagggcaaggcccacatcttggcctctgcatcttgatctgggctggggccagtccacctggtctttctggccagtgctcacactgtaagccagtcacaagttctgtcaacttctttcctgtgttaaaaaacaagaatggctgggcacggtgactcacacctgtaatcccagaacttttgggaggccgaggcgggaggatcacctgaggtcagcagttcaaaaccagcctggccaacatggtgaaacctcgcctctactaaaaatacaaaaattagccagtagtggtggctcacccctgcagtcccagctactcaggagcctgaggcaggagaatcgcttgaacctgggaggtggaggttgtagtgagctgagatggtgccactgcactctagcctgggcactgagcgacactctgtctcaaaaataaatacataaataacaagaaagcttgacacagaatcaagagcacaataaaactgcactctagcctgggcactgagtgagactctgtctcaaaaataaataacaagaaagcttgacacagaatcaagagcatagtaaaagtggctgctgttaatactattaactgaatcaaacaccagcaaacacttgcctagttctttgtcctcctggatgatcctgacatggtgggtagcatgaaccagcacataatggacttcatctttcctaccactagtttctaaaattcatgaatgaaggctactcttgctgagggcaccctctaccttcccactgtcctttcagaccccctagtggctgacccaacacaaaggtcagaaagtcctcagaagcctctcctggcacctggcagtgagtcagggctggttaaatctggatgaggatagtgcagcctggagggctttcctcggagatcactgcactcactaggtccaccctctctcccagatactaggaagggaaaacatgccaagtccataaaacaatagcaccatcaagtgtctattaaacattcaaatgttcatggggcagaacactgagcatagacatagcctctcttctctctgccacctaataacacaaatgtgacacagcagccacatctgcagcgctatgtaaaatgttccaaagattagtgtatattcagattatctcatttgggactcaagtcaaccccatataaggcatgtggataataatgtattgacttgtgagacaactgggataaagaagaaatgttagattttctctgattatatagttagtgggtagggtagtaagagtagtctttgaaactgctgtatttcagtgagcctaacaagtcattgaagataaaatacacaattatttttatctgctaccaaggaagaaaaatgctgagatgcatcaattgtaattatttcaaaattaaaatgtgaaaaaatgtgcaccttattgactaaatacactaagtaattcttctcattcctagttttatttactttcaacacagcttatatggtccatgtcctcaactttcttttgctccacaagaagggaataatgaagtcaccacatcattgttttcctttggctagggcactttggcagaatttaagggaattttttgtttcattatttcttaaaaaatatgcttgtgtttttttttgtttgtttttttaaagtatgtttctgtcttttcctgctttattccctgctctcatcattaagttaaaagtggaacaaagtgagagttttgagggactaattattagtttaaagtgaatggctgactttatgatgatatgacaattttaaatggctggaggtggactcatgaggggtttaaagattttatcagaggttgataaaatctaatttgcactccacctagatgtatttcttcaaacataacataaacttaatatattcctgatgaagtatttctgttattaaactcttaacaaaaaatttttttacagctccttcaccagtgcaaccgccatttttctctgaatgttcattggggtatttttctccagcaccatctctttctttgcctccaccacctcaggtttctgtaagtcagaattgatttctaagaaaattattttgtcttgtcttttctaatttgtttttaaaaacgaatggttaggtttgaagagggcttaaaaaatcagaattgcttaccaagaattaatagcaatgaaatacgtagaataaacagttgattataccagccaagctatccatttggtagatttttttcatagctaatttttaatttcatgttgacttttcggtacctatcatgtttccttcttcactttactctcagatagtagctactcagaaaatttattcaaaaacagcaagttatctactgttttggactgtctcttttttagggaattggaatttacatgcattaggatgcttctaaaaattaatactctcctttctcctcttttcataaaaatggttatttttaacttgaaaatccagcaaaagaaaagcattttctatgaagttaatttcttttcccccccatctccagtcctcccactaaaaataaaacaaaaaaataaaaacaataaaaggaaaaggaaaaaaaggaagtagaggaatcacacattaaaagttttgacattatttttagattgagaggacctagagatcaaattgagtatctctcagtaggtgtaagagggaacttttccgtttcaggaaagacgtctagtgtctttctagaacatatatggtgaggggaatattagagccgatagtgagagagaaaacagcactttcttcgttgtaatgttttctttttgggaatgaataaatgaactaaatgccaagggaaatagtggaagatctttgatgcaaatacatatccaaatttagggatttgtgtaaaattagtttcaaaaaatagatattctttaagaagccattttaagagagtagtggtgattcttcttgatacttaattaatgattaaagtactctggactattattcacagaatcccttggtttctaatttttattttttactgaaatattatgtcttgggtttcagtacctctacttgctttcaggtagtcatctagaaggaaggaccctgtatagtttgatatctatatcttctagaatgctaaatggatataagaattggaacagagaagtttctataattttccttgaagttaataaatgtttcaaatattgttgattttttttaaaattgtaaaaataacactttttcgtggttggctattgatttctggtttgttttgaggttaacatatacttagcttactatatttacagctaaaataataatgtaaagtttatttttttctagtttaatattgctgcagagagaagcatttgagttgataaaatttgcgttgtaattctttctttttttaaaaaatagtctctgccacctttgagccagccttatgtggaaggcttgtgtgtttctcttgaacctctacctcctctaccaccattaccacctctc

SEQ ID NO: 625 - DNA, 6108 bp, Homo sapiens
tataaactgtctctgagtgaaacatagtaagaagtagacaagaaaacaacatacaatagataaacacatttacccagaatttatagctttcaggtatcattaatttatttataattaaaatgtttttgaatttttggggaaatattctgtatgtagtcgtgatgacataaaacttgtttttgtattcctctagtttcttaatcatacagaagtcataagtgtacaagagtttggtgtcattttatacaggaagagctaattatttagtggctcagctaacaatgggggatttcgtctgtatagctcgtactttggaaattccattttctatctgattatacagttataaaatgtcaaccagtgtagctatcatttgaattgaatttcccaaagatgtgataggcacatctaactgaatcaccatgatttttgatactcttccatagaagataactatcagttcttttgtgatttgtaacccaagacagaaaatgctttgaaactaaaaaagtgttgtatacttagtcttcagatcctgacctgaggcgatccttagataagcaacctactgatagtggaggaggcatttatcagtatgataactatgaagaagttgctatggatacagatagtgaaaccagttctccaggtatgagccaaaacttgaaacctttgtgtatttacatgtattaaatagagaatagtcattatggtactcaaaacctttaaagaaatgtgtaatgaaagtgagatttgctgatgaactgtatggcgatagacattatttgttgttgtaaatacttagagagcaaacctcaaataagtaatattaacctttatttccgagtgtttctagatagcctttaaattaaaaaacaaataaataagacattgtttaaactctgttaactgtttgctctagaaagtgaagattgggccgggtgcagtggctcacacctgtaatcccagtactttgggatgctgaggtgggcagattgcttgaggccgggagttggagaccagcctggctgacatggcgaaaccctgtctctactaaaaatacaaaaattcgctgggtgtggtggcatgtgcctttaatcccagcttcttgggaggctaaggcatgagaatttcttgaacctggaaggtggaggttgcagtgagctgacgtcgtaccactgcactcccgcctgagtgacagagcaagattctgtctcaaaaaataaaaagtgaagaatgggaaagatgagaacactactctttaaaaaaacaaactcttgatctttatatccaagatactttctgctttagtcaaagaacaaaattccttttttgctatttggcttcctgtctctttctagtacgataatttgtagaaattttgagacagaaagtgatagtactagtggcatctcaggaaaggctggttagaactggtcagggctgtaactctcctttaggttgcatagtctagaatctgacttatctttgagggccagagacttgattttgttgatgttcaggggtgattggctgtgagagacctattccttcacaaataatttaaaacacttaagactgaggcagataacagaacgcagttggcattccaggaactggagaatttggaagaacacatgatcagtgtatttctccctatagtcacatagtgagaccaaatcaaaactggaatcctactttggtgtatctagactagagacaaaacaaaatatgtattatttggctagtgtttaccaaaatgctcatttttcaggttgttactttaagctggtgtttgatagtcttatattatgttttgataacacaatttaacttgctttggtcaatctttaattttcttattttcagattcttggagatgattcattataattcccaagtattgacaatattattaatactttatttctataaaataactttatgatctatgctttttaaatgattttgtgaaacatatagagaacatactctctaagcggctttgtcaaattttaattttttgccacgttaactgcggatatttatatatatgtatttttttccattcaagatcaatttttttctcaaattttgccaacacagacatattatatttgaagaaatgtgcattaaaaacatcttttaattcactttatcttgtattaaaaaagaatgttttccatatagagtttttcgccgggcgggggaaaaaaaaaaccaagagaattcaaatacggtaaaaaactagtttaggatctgaggtttcaggcagttcagaaattgccagaaggttatttattttttttcactaggataccacagtggcagaacaacttaaaaatcagaatactaaaatgatggggtggtcccggcagctgcccctggccagctggagcacacagtgccaccaaggtagagaggccagaggcagtgggcatcccagtgccagcctgcccgttccctgtaatgaaagcagagcaggaactgcagttgcatggccttgggggtgggtggacttgtggaaagccaagctctgaggctgcaaataccttgagcaccactggtggtcccagagcaggttgagcctgtatctgcacctctgttccaaccagccttctggcacagggcaaggcccacatcttggcctctgcatcttgatctgggctggggccagtccacctggtctttctggccagtgctcacactgtaagccagtcacaagttctgtcaacttctttcctgtgttaaaaaacaagaatggctgggcacggtgactcacacctgtaatcccagaacttttgggaggccgaggcgggaggatcacctgaggtcagcagttcaaaaccagcctggccaacatggtgaaacctcgcctctactaaaaatacaaaaattagccagtagtggtggctcacccctgcagtcccagctactcaggagcctgaggcaggagaatcgcttgaacctgggaggtggaggttgtagtgagctgagatggtgccactgcactctagcctgggcactgagcgacactctgtctcaaaaataaatacataaataacaagaaagcttgacacagaatcaagagcacaataaaactgcactctagcctgggcactgagtgagactctgtctcaaaaataaataacaagaaagcttgacacagaatcaagagcatagtaaaagtggctgctgttaatactattaactgaatcaaacaccagcaaacacttgcctagttctttgtcctcctggatgatcctgacatggtgggtagcatgaaccagcacataatggacttcatctttcctaccactagtttctaaaattcatgaatgaaggctactcttgctgagggcaccctctaccttcccactgtcctttcagaccccctagtggctgacccaacacaaaggtcagaaagtcctcagaagcctctcctggcacctggcagtgagtcagggctggttaaatctggatgaggatagtgcagcctggagggctttcctcggagatcactgcactcactaggtccaccctctctcccagatactaggaagggaaaacatgccaagtccataaaacaatagcaccatcaagtgtctattaaacattcaaatgttcatggggcagaacactgagcatagacatagcctctcttctctctgccacctaataacacaaatgtgacacagcagccacatctgcagcgctatgtaaaatgttccaaagattagtgtatattcagattatctcatttgggactcaagtcaaccccatataaggcatgtggataataatgtattgacttgtgagacaactgggataaagaagaaatgttagattttctctgattatatagttagtgggtagggtagtaagagtagtctttgaaactgctgtatttcagtgagcctaacaagtcattgaagataaaatacacaattatttttatctgctaccaaggaagaaaaatgctgagatgcatcaattgtaattatttcaaaattaaaatgtgaaaaaatgtgcaccttattgactaaatacactaagtaattcttctcattcctagttttatttactttcaacacagcttatatggtccatgtcctcaactttcttttgctccacaagaagggaataatgaagtcaccacatcattgttttcctttggctagggcactttggcagaatttaagggaattttttgtttcattatttcttaaaaaatatgcttgtgtttttttttgtttgtttttttaaagtatgtttctgtcttttcctgctttattccctgctctcatcattaagttaaaagtggaacaaagtgagagttttgagggactaattattagtttaaagtgaatggctgactttatgatgatatgacaattttaaatggctggaggtggactcatgaggggtttaaagattttatcagaggttgataaaatctaatttgcactccacctagatgtatttcttcaaacataacataaacttaatatattcctgatgaagtatttctgttattaaactcttaacaaaaaatttttttacagctccttcaccagtgcaaccgccatttttctctgaatgttcattggggtatttttctccagcaccatctctttctttgcctccaccacctcaggtttctgtaagtcagaattgatttctaagaaaattattttgtcttgtcttttctaatttgtttttaaaaacgaatggttaggtttgaagagggcttaaaaaatcagaattgcttaccaagaattaatagcaatgaaatacgtagaataaacagttgattataccagcaagctatccatttggtagatttttttcatagctaatttttaatttcatgttgacttttcggtacctatcatgtttccttcttcactttactctcagatagtagctactcagaaaatttattcaaaaacagaagttatctactgttttggactgtctcttttttagggaattggaatttacatgcattaggatgcttctaaaaattaatactctcctttctcctcttttcataaaaatggttatttttaacttgaaaatccagcaaaagaaaagcattttctatgaagttaatttcttttcccccccatctccagtcctcccactaaaaataaaacaaaaaaataaaaacaataaaaggaaaaggaaaaaaaggaagtagaggaatcacacattaaaagttttgacattatttttagattgagaggacctagagatcaaattgagtatctctcagtaggtgtaagagggaacttttccgtttcaggaaagacgtctagtgtctttctagaacatatatggtgaggggaatattagagccgatagtgagagagaaaacagcactttcttcgttgtaatgttttctttttgggaatgaataaatgaactaaatgccaagggaaatagtggaagatctttgatgcaaatacatatccaaatttagggatttgtgtaaaattagtttcctttatagatattctttaagaagccattttaagagagtagtggtgattcttcttgatacttaattaatgattaaagtactctggactattattcacagaatcccttggtttctaatttttattttttactgaaatattatgtcttgggtttcagtacctctacttgctttcaggtagtcatctagaaggaaggaccctgtatagtttgatatctatatcttctagaatgctaaatggatataagaattggaacagagaagtttctataattttccttgaagttaataaatgtttcaaatattgttgattttttttaaaattgtaaaaataacactttttcgtggttggctattgatttctggtttgttttgaggttaacatatacttagcttactatatttacagctaaaataataatgtaaagtttatttttttctagtttaatattgctgcagagagaagcatttgagttgataaaatttgcgttgtaattctttctttttttaaaaaatagtctctgccacctttgagccagccttatgtggaaggcttgtgtgtttctcttgaacctctacctcctctaccaccattaccacctctc

SEQ ID NO: 626 - DNA, 534 bp, Homo sapiens
aaaatataaaatcaaaacgttactctaagtttccttaaagtcatatttcatagattctgtcaaataaggaagtttattttataaataactcttggaaaaaaggaaggtaggttataattgggaaagcatcttttatagttgtaggtattggaagaagaaatgaaggctaaaattattattagcagagactgcttttaggttttttacgattttctgtttagatgaaagtaggattactaaattgtggtgaaaacttattctgaaaatggctgttaagtcttaagtacaggggtagaatttcattagtttttcattgtttagtaatgtagattgagaagtgtgtcatgactagtatggactatcttaataaatgttaaatcatgatatagtaataaccttagtgcatgtggctattttgtatttagtggtcaaacatttgttgaacatttactatgtatataaatatacttgtcgtcttgtctttttctctctccctcccttcttttaccctctccacccaaaaagaagaaaaaa

SEQ ID NO: 627 - DNA, 26112 bp, Homo sapiens
gcttccaaagcataaatcagtggttgtaacactaaatgattcagatgatagtgaatctgatggagaggcttccaagtcaacaaatagtgtttttggtggattagagtccatgattaaagaagcaagacgaactgctgaggtaagtgcaataattaaaggtggaaagaaagatgaccttttgatgatcagtaaagtttattttttcctgaaaattaaaccataaagttatagatttttaataacattgatttgtggaaatattttaagtatttgtgctattaggactttatataatgaagcatgtatcaatgtagattgattttactattaaaagtttccattatttgtgtttcctattaagtatttcctttttcaaaatagtaaaattggttggataattgttctgtgtagtaaggagactgttgttttagagttgtgttgtgttaccagaaaacagtttttattaaaatgtattctctaagtacaacttttatcgttttttccctatttcagtagttgtttagctgtgatttaattcaatgattttcagactgtagatcttcactacttggtggcgtatacaatttagtagttatcaaccaacattgttttagaaaaaagaatagaaaatgatgacattcaggtatttctaaataaattcagtatacactgggttgcaatgtaaaatataaatcttagtatggaattttggaaagctgatgatctagttgacttcaaatgtttttttttttagcaagcttcaaaaccgaaagtacctccaaaatctgaaaaagaaaatgatcctctgcgaacaccggaggctttgcctgaagaaaagaagattgaatatagattgttaaaggaagagattgccaagtaagtgtaattttatgtaattaacattaaaagtatgtgatgttttcaaaacttctcttatagagtttcttggcactggggaatgagtgatgatagttttatccaagatacagagttaatgttttataactcacacagaagatggtgctggatggtcatacatacacttgaatagagtgatgtgctaggacataaccagcttagaaaaaagatgaaaacactcaaagagaaggactccactatcaactttgaatgctgacttgggtcttgcatattggtcatcatctttattattagtcggtgtgattaatattgttactgcatgaaatagaatacattttaaaaatagtttaagtttattcttgggtgtaatgcatatatcctttttgataattttagccgtgagaaacagcgtttgattaaatcagatcagctgaagacaagttcatcatccccagcaaactctgatgtggaaattgatggtattggcaggatagcaatggttactaagcaggttacagatgcagaatcaaaactgaaaaaacataggtgagccttgttatcttcacatatctaattgttcctgtggtagagaaatacatttttgtggtgtatgttattaataagcgtactataagattatacattttctcacttaaactttgtagaatgtagaagtctgtcattttgttgaatgacactacatttacataaagtaatgaaattaatgtttaaataaaaataccggccaggcgcggtggctcacgcctataatcatagcaatttgagaggccgaggtgggtggatcacttgagatcaggagtttgagactagcctggccaacacggtgaaaccctgtctctactaaaaatacaaaaaaattagctgggcatggtggtgcatgccttgtaatcccagctacttgggaggctgaggcgggagaatcgcttgaactagggaaatgcattcccactgtgcctggcccaacgttgaatatttactacaagttttcaacagtaattcacgttacctcaggcttaaatttttttttttaaaagatcagtctcatagttactattatcagtgtagcaatgttaatttaaatacctgtgtgatgaatataaaaatattcatccctttacatttttatctgtgtctcgtagatgcatttttaaaaattgtgttattactttgaaaatttttttattctgacagtctgctcttgtagggaaacattaacaagaattttgttatttctcatttaggattctcttgatgaaagatgaatctgttttaaagaatttagtgcaacaagaagctaagaagaaagaatctgttagaaatgctgaagcaaagattacaaaacttacagaacagcttcaagcaactgaaaaaattcttaatgttaacagaatgtttttgaagaagcttcaggaacaagtaattattttaaaatactgtagtctcctgtttactacacatttttataggccaaattttctgtaagacaaaccactgtatactaaagccagcaaaatatgcataacctatagtttcttgttgagaaataatattggaatatttttattttcagttgaatgctcaaaagccgcggtgtttgagaagaagaaatttcctgttttaaggttttcatttacattttcaggattattctatatttttcagattcacagagttcaacagcgtgttacaattaagaaagctttgactctaaaatatggagaagagcttgctcgggcaaaggcagtggccagtaaagaaataggaaaacgtaaactggaacaagatcgctttggggtgagggttttatagaaatattttacttttggaaagcagaaagtttttatgatagttttaagggtaagatgtatatataaagtaactctttgctgtaaattccaagagattaagattaaagctttgtttttaaatgacatccacatttttggatgtctactttattattttgtcttgactttgtttttgtcataagtcatagattaactagcaaaacttttggctacttatgttaaactctgttttattctccatattgatttagttttataatgttggcattgtatggtggggatagcacaattatcttaccaaaaattgtttataaaatcacagtgatgtaaaatacgtgtatcatttttctcccttagccaaacaaaatgatgagactggacagttctccagtatcaagtccaagaaagcattcagcagaactaattgctatggagaaaagacggttacaaaagctagaatatgaatatgccctgaaaattcaaaaattaaaagaagcccgtgcccttaaagcaaaggaacaacaaaatatctctccagttgtggaagaggaacccgaattttctttacctcaaccctcacttcatgatctgacacaagataaattaaccctggacactgaagaaaatgatgttgatgatgaaattttgtctggttcaagcagagagcgaagaagatcttttttagaatccaattattttactaaacctaaccttaagcacactgatactgctaacaaagaatgcataaacaaacttaataaaaatactgtagaaaaaccagaactttttctagggttaaaaattggtgaattgcaaaaattgtattcaaaagctgacagcctaaaacagctgattttaaaaaccaccacaggcattacagagaaggttttgcatggtcaggtaactgaacatttcatattttctttaaaatctggaattcacccagccttatttgccttacagaattattattttcttttgcaggagatttctgtagatgtggattttgtcacagcacaaagtaaaacaatggaagtgaagccatgtccttttagaccctaccatagtcctcttctagtttttaagtcctacaggtataaaagaaagattcaataagcttgaatttcaggatttctgtttggtttttaatattttatcttgaatatttgatgataatgaaaaagcaattgaatcattgctattgataaccagacttacccttttaaggaacataaaaattaagtgtcctgccgttgggctcaaaccacactcttggatttatcagttcgtatcaaattccagtttctggctattggtagaagtgtggagaattttggatttctgtttgttaggaattttaggaaaaataattggaatcttagaggttttttttaatttttgatttttaattttactgttattcagtctaagaagtgcattggccagccttcataaaatttatttagacattttcatatgattaactttgtgggtcccccatttagacttttaaaagttgtgagaatgttaaagggttgcatgtttttatcttaaaattgtaaagcaccttccaggtaatatagactttttccagattttcttgtcttggctggtaatgtgtgtaagaaataccggtattatatagtattttattatgtggtgagaaactacttttagaatacaaggttttttttctgtttaaactattttatgttcttggtataaaagcaacttgtttctatcccttgatattctaggtcttttctcgaattaattttggcattaatttaattagataaatagctcataaatagtaagcatggaaattttaacttgagaaagaaaaactaaagttttcttagttttctgaggaatgtttgttgggcataatatacctgttcactctcttcaccttagatttagtccatattatcgaaccaaggaaaaacttcccctgagctcagtatcatacagtaatatgattgaaccggatcagtgtttctgccgttttgatttaacaggaacatgtaatgatgatgattgtcaatggtgagtagtttttgtgaacattttgtaatttgaaaaatggtcttgtttgcttaactttgatatgtacatgattatcttttctgtgtttttttttatcttaggcagcatatacaagactatacacttagccgaaaacagttattccaggacattctgtcatataatctgtctttgattggttgtgcagagacaagtactaatgaagaaattactgcttcagcaggtttttaaagacttcctattctctcccaaatgaaaattgaatttaggcaacttaaaaattctatattagttgttgacattgtaaaatacttactataattcagtgtatttacccataatactttatctagatttgctgtatccagtataattacggtaaaaatttacttcctctgttacactagccacatttcaagtacccaatggccacatgtggcaagtgcatgccagtaggacagcacagatttaagacatttccaacatttcagaaagttctttggacagagctcatttaaatatttagttccatttatttaaaagaaaatattaagctatttgtatagaaactttactattgattttaacataggagcctatttttacttattgttttcaaaaaatagaggaaggctggaaattacgatggctgttgtttccaattctataatgaaataagacttgatacacttgtgagcaaatattattaagctttttctcagatttggtgccaagtaataaacctcaagctacaaatcttttggaagtaaagaaaataataattactaaatttggtgttatcacagcccagagtgattgtaatgtcactgaatctattttatcactcccaatttgggactttaacttaattactttgttcattttaggaactacttttttttttttttaatcccaaatggggtatatgatgtggtaggatttgccatagtagttaagataatacaggctttgccctttcaaatgccataggtgttattgactagtaccatataatcgcctttaattcttaaactagttcacgtcatacattttaattatcctagtctctgtaattgatatttatcatgaagattgcattgctcttatttcagaaaaatatgttgagaaactttttggagtaaacaaagatcgaatgtcaatggaccagatggctgttctccttgttagcaatatcaatgaaagtaaaggtcatagtaagtacatatataagtgtgtgtgtgtgtgtgtgtgtgtgtgtgtgtgtgtgtgtgtgtgtgtgtactgtatctctttctgaaaaggactttttagtttctgtatgacagaaattttgttggtattatgttcttaatgtaatacatatcattccaggctgggtgcggtggctcacgcctgtaatcccagcactttgggaggctgaggtgggctgatcacttgaggttaggagttcgagaccagcctggccaacatggtgaaaccccgtctctactaaaaatagaaaaattagccgggtggtggtggcgtgtgcctgcagcctcagctacttgggaggctgaggcaggaaaatcacttgaacccgagaggcggaggttgcagtgagctgagatcgcgccactgcactcactgcactccagcctgggtgacagagtgagacttccatctcaaaaaaaaaaaaaaaatacgtatcatttctaagatggagtgaatgtagttcttctcaaatattatttgagtatccttcaaaatgttaaaaaaaaaactagttatatcaattaacaatcttctcctatctactttagctcctccatttacaacctacaaagataaaagaaagtggaagccaaagttttggagaaaacctatttcagataatagcttcagtagtgatgaggaacagtctacaggaccaattaagtatggtaagaagttatgtaatttaagatccagaattattaaattgtggtgttccatctttatttaacactttgctaatcctttggtgtatcagcctgcctggttaaaaaaaaattttttttaaaaacgatgccattgggtttttacacaatacagttaattcactgtgcaggattgcctctgaaattgcgggatatttgtgttcatggctcctctccagtaaatgcaaggagcactgcttagttaataattatgactgcttcagatatttccaaacatacattagttggtggggaaggtagctcccgtttgagaaccactgcctagcctgtgtcctccttaagggcaggtgttctattttacttcatctttgaatatgttttctgacatgcagaaggctcaaaagatgagaatgaacaaatgatgaatgaactaatgaacaaaataatgtatgaatgagtgcctgtatgttaggcacattttactttctaatttcaagtttgcattatttgtgaattagcaagtatccaagagaggtatgctattatgtacttatttacactaacgtaacactgtttttctagtttagatatagtagaataatctttataaattatgacttttaatttcttaattataatttgcagtttaacaaatgtgaattcatttgataataatgaaaaagcagttgaatcatagttactgttaagtggactgaaaaggtaatgtcacttagccttaaaatagcagagtcctaattactccttttgttctggtgtaatttttagtagcacctctttccactcagaagggtcctggtttgggtgataaattatgtcatagctctaccttgaagctgtgagctagtacatgtcattagaatctttaggtttttaagttactttaaagatgagaccaattgttttctttttcttgcatctgtggactaaagaaaatgtgaagctaataatactttttttttaaatagctttccagccagagaaccaaataaatgttccagctctggatacagttgtcactccagatgatgtcagatactttacaaatgagactgatgacatcgctaatttagaagcaagtgtgcttgaaaatccttctcatgtacaactttggctcaagcttgcgtacaagtacttgaatcaaaatgaggggtaggtcaacttcaaatctttgtgtaaacagttgcacatttatatttttatgtttgaggtttttttacctatggtaatcagtcaggtttctttcctagtatcaatggagtctttgttttttgacaaagccaaaagcattttattgtttaaaagctattagacaagtttaagattagatcttgagtttgtgtgcatggctcagtgtatgggtaataaattatactaaagttttttactccagtaggctcttatttcaaagtaggattagttaaaacagtaaattctgactagtggaatggttgattgttttttaaaaaaatcatagtagtcatagtttgttaataaaattatgataaaataatggtggaacaggttaaattttgttaatttgtaatggatatttaaagcttatctgagaacttccaaattatggtgaattttctttctgtctctgtcatattaaattatatgtatttaaataaggtaaatggtaataacttatacaaccaatagtttgtattgcagatggcatcttctaacttcttggtagtagaaataagccaagaataatcttttcataattataactttatagttacaataattcaagggtttttttttttacacgtttctttgaaatatttgactatcttaaagcttttaaataaggcagtgctgcagagtgctaataaacccacacatgcctggatgtgttgcttatttaactttcctgtgtgtcatttccatgttaatgggataagttacagtgttttcttttctgactcatttactgagtgaaggccaaaagaaccatacattattttatgaataggatcatgagaaagaattatcttctccaagagatagcaagcccttgaccgttgaaaagaactattatactgaaagctttgatattttgtacttgcagtagctggccttgagagagagttgtttaacttttcgcattcccaaatggtgtaaatcataaaaggtattgctgaatatggacataaagcacatttgaagttgataatcttagtggttttataacactgtacttttatctgtggtaaatgcttactgaacattcacttaaaaaaattgttgggtctgtggaaaatcagaaacttttaggcatgtgatttaaaatcttaaatctagtaccccttttcataagtgatcctgacttcttggtaaattctagtagaaaatggaattttaaaattgactcattggattagccctatttaaattttcaagcaggttctaaaaagcacttccaccttttcttttatatatacagggagtgctcagaatccttggattctgctttaaatgttctggcgcgagcattggaaaataacaaagacaatccagaaatttggtgccattacctcagattgttctcaaaaagaggaaccaaggacgaggtgcaggaaatgtgtgaaacagctgttgaatatgctccagattatcaaagcttttggactgtgagtagaaaagataacgtacgtgtgtgtgtgtgtgtgtgtgtgtgtgtgtataattatttggatcatcttaaaaattgataagtagcttaatagagcatatgctttatctgaatatagacataataaccttactttcagtttctagtaaccacaaagccacttctggatcagaatttagactaagcaagaagaaaatatttagtgaagaggtgatttttttgttgttgttaactttattggtaaagaaaaaatgtaaaattgttaaaaatttcacacttacctatttttacacagttttagtttgggcaaagttaagtgtagcttttgcaaaacacctgaaaaaattgtttcttttaaatttatcttaaattgcctctataaaattataatgactgccaggaaacatttttgtctttttattatttgtttccattgcttatagaaataatcccaatctgtaattcacactaatatctaaaattgccaagctaaaaacatttgattgagaaaaaatggcctcttcctctttctccaagagaatgagatggtttttttggctgtcagtttttgaggcagggtctctctatgtcacccaggctggagtgcagtagtgcagtcgtgactcactgcagcctctacctcctggacccaagtcctcctggactcagcctcctgaaaagctggggccacacatgcgtgctaccatgcctggatagtttttagattttttgtagagatgggtttttgctctgttgcccaggttggtcttgaactcttgggctcatgcaatcctcctgcctgggcctcctgaagtgctgggactatagatgtgagccaccatgcccagccaagaatgggatgttttttacccagacttaaaattataattgatccacttgagaaataaaataaatattcacctgaacttttatcacctgaacttgggagccattagtttcagataaatttttaaataaatctattgctgtcaaatctgtcatttacttaccaactgaagttgtgaaccaaatagatttggataacatgataccgcttaataaacttgctactctacttcttactctttgaactcaggtagtgaacagatttggatagtaaagcatgcttgatttttttttaacctagagcattgtacgtaagtgaatgctgttatcactacaagattttatagggtgtggaatattcaaaagatgtaatatttttctttgaaattgcttggtctttaatgtgttttgtcatgcatttcctttctttctttttaaatcttttttgagacggagtctcgctctgtcacccaggctggagtgcaatggtgtgatgttggctcactgcaacctccgtctcctgggttgaagtggtcctcctgcctcagcctcccaagtagctgggactacaggcatgcaccaccgtgcctggctaaattttgtatttttagtacagatggggtttcaccatattggccaggctggtctcaaactcacgtgatccacccaccttggcctccctaagtgctgggattacaggcatgagccatcgcgtccagcacatttctaatacaaatctattctcaaaacttttatacagtcacacacctaagcaacacaaattgtatgtgataataaatgtgtacttttggatattcatcatgatcttgctgcgatttaccttttaagtcagggaaaagagaaatgaaattgcttcagtgatatctctaagagtatatctgtattgttttagttttcatctgattccacttttcgatatgtgatagaagagggagtctaggttgtagtactagaagatggagttatacatttttacagtaatcctttttgcagaagttgaagatttactatgagatggtttcttaatgaaatgtgaaaagtctgtagttttggtttattcctgaaaggcaacattaataatataaaggccctttgggcagtttctacacctagaaagtacctttgaagaaaaggattacgtatgtgagagaatgttggagtttctgatgggagcagccaagcaggaaacatccaatattttgtcctttcagcttttagaggctcttttgtttagagttcagctgcacatatttactggaagatgccaaagtgcactggcaattttacaggtaagcacttggtacagcatttaattgcattttgcagaaaaagtttaaaaggtctacaccgttatccatagcattatttaatggttgaaagcacaagatttggatttgaatccttgtttttccacttactagtaagtcatgtgacattgggtaagtttatgactttatttcctcatttgcctgatgggtgtaatatctttagagtttttataagttttcaatgaaaatattttatgttaagtatccgcaggtaaacttcaagatttaagccataaaggaaaaaaatcagtctgatgaaaataatctatatgggtgtggtttaaaagattttttttctttttactgttttgtctttgtcttattagattttaagtatcaggacacttaaaatgtacaaataaatgtgacctttttattatttcataaactttagcatagtaaaaattatgttaatctggtactgacatctctaatttttttatcaaaaaattttaaattttgcctagaatgcattgaaatctgctaatgatggaatagtagctgaataccttaaaaccagtgatcgatgtttggcatggttggcctacatacatcttattgaattcaacattctcccttcaaaattttatgatccatctaatgataatccttcaagaattgttaacactgaatcatttgtaatgccatggcaagctgttcaagatgtaaagactaatcctgacatgttgttagcagtttttgaaggtaagtataaagtttataaattgtaatatcaactgttataacatcagtgtttagaacattaactacccattattgtgattctctgtaattaagtggaacaaatttatatctctatattgcaagttttagtttcacaatttattaggcaaattaagtcttgaatcagagaagatggacactggcatctttgaaaaccaataactgcacgatattacattgtttatctttctgattgtggcaaaggatatctgttaaatgcgtagagaaaataaattatgtaagtttgatgaattgattaaatcagagaactaggtactttttttttttttagcagtccattaaggtggaagtttaaagatttctatcttttcaaccaattaatattttctccatcagtcagtgagtttggttgcttctctatattaaatgatacgactattgtggaacacattacaagatataaagcctcttcctgaaggaagtatatagcctagtcagaagataaaatctatacatttgtcataattattaaacatacaaggccatataactgtgtgttagtatatagtctaaattgtatgctacgtaaaagagactagggccgggcacagtggctcacgcctgtaatcccagccaaggaggccaaggtgcgcggattgcctgaggtcaggagttcgagaccagtctggccaacatgatgaatccctatctctactaaaaatacaaaatttagccgggcgtggtgattcacgcctgtattcccagctactcgggaggctgaggcatgagaatcgcttgagcccaggaggcgaaggttacagtgagctgagatcatgccattgtacttcagcctggataacagagtgagactcagtctctaaaaaaaagaaaaaaaaaagagactaggatctgtgatttatagaattatttgatacaggccatgaacccaaagggaagagattattatagattggcatgatcaaggaagtcttcatagaagaatggggacctggagctagatgtcgaagcatggctatcagtatgacaaagtgggtctcatcagagatggggtggacccttgtcttatttatcattttactcctaagggcctgtaaggatgtctggcaaattattaagtgcttattaaataccctgtgaaggaaggagagaaaagaaaggacattactgttaggggagttaaataaacaaaaagcaacaggtagaagggaatttatgcaatggatttgaagtgagattgggaaaagggataggtcttatcagactgagaattctgtgctggacaatagtagtgattaagcttgataagtagaatgatacttgattgtcaagaatcttgaaaatgtggtagactggatggcagtagaggttctttaagaaagagaatgtgcttgaagagaaattataccaatggtaggaaaaccaaccagaagctgatggcagtaactgaagtacaagaaaagtattctggtaaggaggatattagagatattttaagttatcacatggaaatacatgggggtgaggcgggggggttgaagattaaatgtcagggaagaggaggaggagtaaacaaagatttcagggttttgagactgggaaaaggaaagtgtcattaatagaaaactggtaagttgggaagactgattttgatggtaggagtagtatttgtgattgtaattggtcattcaagtggaaatgattgttggcggtaggaaataaggaagtggaccttggccgtgcgtggtgcctcacatctgtaatcccagcacttgataatctgctgaggcatgtggatcacttgaggtcaggagtttgagaccagcctggccaacgtggtgaaaccccgtctctactaaaaatacaaaaactagtcgggcatggtggtgtgtgcctgtaatcccaactactcgggaggctgaggcaggataattgcctgaacccaggaggcagaggttgcagtgagccgaggtcgtgccactgcactccagcctgggcaacagagcaagactccatttcaaaaaaaaaaaagaaaaggaagtggaccttaattggacaattatcaatacgtaagtggatttgagtgttattcacatagaagttactgtgttacagggtgctttacagtttttataatgtgcttttgaagtaaattatgcagtagttgaggctatgagatattttttctgaggaaatgagatttaagagcataacagtaaggagtaaaagggagagtagagtcattaaaatgggactaagaggaaatttaaacaatctattggaagcagaggcaagaagaaattaaaaagaagggaaagaacactgtcaaatgttaaataaaatgaaggtagaggtgagcttttatgtttggttagatatgagtccttatgaatgaacttcaagaagacagtttcaaagtgattgcattcacttttaaactccacagatctgggaagctgtggtaccattgggtaaggaggaaatggtcacagctgggcaaagtaaaacattgtaccgtttaataagtggcaaaaagatcaagaaagaactctttacaaggggaaaagtgtgttttgatggagtaaggaaaggatctagtttggagagacattcaaatggctgtggggcagcagagcaagacctcctttgcagtggtcagggaaagatgaaaagataatttattctgtaattttttttttgttgagatggattttaaagaatttaggataattgcagagatacttgtttaaatgaaaacactgatagatgcaaaagctcatatgggatggctttattcttaccaggaaagttgagggtaaggaattgaattttaggattttggagattacttgaattacttcctttgagtaaaagccagctcagtaaaggtgaataagatgatggatgggtaatcaaagggaggggtcatcttttcccattggtctctcagagttgaagtaacacagtcaaatatttcatttttatgattgacgtgattcatgttgttgtgatgtttttgggtagatgcagtgaaagcttgcacagatgagagccttgctgttgaggaaagaatagaggcctgccttccactttacacaaacatgattgctctgcaccaactcctggagaggtacaacttaattgccaagcagctaaccttatattaaaaagtgatcttttcatgtctttagcctttttttttcttttttgttaaggtatgaggctgcaatggagctttgtaaatctttattggaatcatgtcctattaactgccagttgctggaagcccttgttgcattatatttgcaaacaaatcagcatgacaaagccagagcagtgtggcttactgcatttgaaaaaaatcctcagaatgcagaggttttttatcatatgtgcaaattcttcatcttacaggtaaaaatgatgcataattcttaaatatgatgcttttatgtttcaaattttgctattggcctcaccaggaagtgtttcctggtccttttaccctttgcaagcagtgttaggtgttccttctctctttgccatagcacttagtacagtgctttgtaattttattcctagctgctttaatatatactatactaaacttcttgaaggcaaggaacatgtttactcatatttgcagcccaacgcctaccatggtgctagatggctaatacataattggtggatgaaatatgagcctgtggtaatactagaagttaagctgtttaatcattagttgaacttaattcagagagtaaaatataaaagttttctgagtatgtctcaaacttatcccctccgccccttacccactcaagaaacttaatctaatgagtacttttttaaggctttttttctccctcgtgacattttaattaaacattgtaagcctgatatatatccccctccctctttttaaaatagaatcgaggcgataatcttcttccatttttgcggaaatttattgcatccttctttaaaccggggtttgagaagtataataacttggatctgtttcggtaagttgtagaattcttagtttgtagaggaatgagagagagcacagttcagtagaaagattacagtttttttcttatatgatgacattttagactgactttttagtacttgaatacccacttaacagaatacttgaaacagaataaatagaacaataaaaatggaggcaagatggaaaattctttaacattctgtggattaaacacactgtacaaagtaaggcatatattaacaccatagtaactcattcttttactttatcgttattgttgttaattttagtacttaatattatagcacttaattatcccaaggcaatctcagtgattttttacaaaatgtattttcatttatttgataggtcatcaaagtgaatataaataatacgcctttttctttttttaattctgaagagaactgctctagcctctgaaatgttatagagtaagacgtttcagaggattcttttctcaaccattaatttcttaatagctcatatagagctgtgcttgctgtctttcctgagagttcctattccaacagtaagaggtcatggcagattttgaataatgattttttggggggaggctcttaaaattatctttcctttgtcctcatctctttatggggttagcaaacttttttcttaagagccagaaagtaaatattttaggttagcaggccatgtagtctattaccactactctactatgttgctttattgagaaaccagccatagatgaaatgcaagtgaatggttatgactgtgttccagtataactgtttacaaaaataggcatggtttgccgatcataagtaaaacagcatcaaaaggaaaatattttatcacaacatactctattattttgtattaggaagaacaagagaagaaagacctaagctgaatatctccccaaaaaatttcttgtagaaaatacagatgagcgaaaatagaatcttaaagcccaaattttgttaagtaagtgatctattcaacctagaacttgttttttggttttggttttttttttttaattttattttaagagaacggaatcttgctctgtctcccaggctggggtgcagtggtgcgatctcacctcattgcaacctccgtctcccaggttcaagcaattctcctgcctcagcctcctgagtagctgggattacaggcgcacacccccacgcccggctaatttttttatattttagtaatgacaggtttcaccgtgttacccaggatggtctcgaactcctgagctcaggcaatccgcctgccttggcctcccaaagtgctaggattacaggtgtgagccactgcgcccggtccaccctagaacttgttgtgaacatggcagttttatttaagatttggggacactattccctcccagacttgagtctttatatatgtcctcttatggtagccagtttattgccatagcgattttagtgcccttcccaaagggcccttctttctgctctgttacatccagattaatatttacaaataattacaaatgaaataattttaaatgcaaattaatagaaaataattaaacttccataagggatttagagatttttcagcttctccatactcagtttcttcctcgtttaaattagtttgctttaacatctcaagctcaggcaaagggctaattcaaggctgaaccaaactctttagagacttgctggttctggtcttgggcacagagataattggtttagtttaaaagaaaatgctaccaatttctgccttggtaactaatgaaagatcttcagatcttcttgatgccagcttaattggcagaataaataagcatcaataaaaatttgaaaatgagttgtctccaaatatattctcattactaagtcatctttattaaattcctttgtggaaatagtcataattcactgagaattaagagaaaaaggtatcctgtttatagcttatttagacaatagtgaaactcttggttacacaaagattgtgcatttctgttagagagtctttttcatcagatattaggagaatgacgatagatgagaccatttttggcattgccatacttattgtatattgatataagttttttaaattcataagttgtcaatgtttattaataggagaaatctgctcttaattggttcaaaatacttttaaaatttcatgagtagaaattgttaagcaaaatgcttagcactataatttttacctggagttgaattctgtcaactctctatgtgacatttagtataaagatggcaggcagaaagaactagatagggtaattttcatgtgtttcaagtcaatttgaagattaagtagatagccagaaaaattaatttggggatttcatttactttagtaaagttaaactagggattatagtcttaagtagattagatttgaagtcatctcttctgaccatctcagttttcagtgaggaagttaagggattaactcatggtgatgtagcttgtcttggcaaagtcaggatgataacctaacttctagatgttctatttcttctctttcttgtgtttgccccccatacagcccgtctaattcattaagacttgttcccttgcaattatttaaaaatttaagataaatagttatactagattgtcatttttgcgatcaatgtatttcctttaaaaacattgttcttaaagatggtggtaagtatcatacacacaaattaaaatacattggaaggaagatggacttagtcaagtagaattctatactgattgacttcttagagtcactgggattgacctataatcctagtaagtattgtggcttttcaagatggggctataatttgtagtatttcccaaccttatttgatcatagatcttttgacaggtaccttacaggctaatgtgttatagaatacactttgatatcatgtctaaaattaaacttaaatgggttgtatgtgtgtatggctgtatgtgagagagattactttcagatataaggtttagtaaatctttttttttaagaaagggtctcactttataacatgggctggagcacaatggtgtgatctcagctcactgtaacctctgcctcctgagttcaagctattctcccacctcagcccgggagtagctgggactgtaggtgtgcatcaccacacctgactaatttttgtatttttttgtagagatcttggggtttcacccaagttgttagccaggctgatcttgaactcctgaccttaagtgaaccacccgcctcagcctcccaaagtgctgggattacaggtgtgagccacagccccaggccttgtaaatcttttttttaacaagaaagtacagatttcattggaaaatttcagatacttggtagactcatttgttctttttaaactaggtttatttagaggattatggtgttttgtttaatcttggggatagaataaaaaattcattttaggaggagagtttttcatataggtataaaataataaaactgtggccaggcgcagcagctcatgcctgtaatcccagcactttgggaggttgaggcaggagaattacttgagtccaggagttcaagaccaacctggccaacatggtgaaacaccatctctattacaaatacaaaaattagctgggtgtggtgatgcatgcctgtaagtcccagctactcaggaagctgagacatgagaatcacttgaacctgggaggtggaggttgcaatgagctgagatcatgccactgcactccagcctgggtgacagagcgagactctgtctcaaaaacaaacaaacaaacaaaaaaaagcattttgagtaatgtgtaatcctagagatgtgaccaaagaggtatggtatacctatgaaaagaaagtctcattgctttctaaaaaaatatttcaatgaaatttaagtgaaactaacgattttaaaaaatatgtgtgtaattcctgtgtgggtaggtgtaatttaaaacaatatttggattttttttttcaggtatctcttaaatattccaggaccaattgacattccatctcgtttatgtaaagggaattttgatgatgatatgtttaaccaccaagttccttatttgtggctgatttactggtgagacatccactgtggagagatattgcatactaggcctgcatttgctatttattactgaattacactgtgtttgttataattaacttgatgttaaagtcattgaagcacaattgaagagatgctaaggtttagtatatactagagaagaaaggtcaaaagaaggattctattgtaataacatctgtaatgtttaaaatactttgtcattccttcacctgatggaaatgaatgatagacatatgttttccttcattttttaaacagcctttgtcatcctcttcaatcaagtattaaagaaacagtggaggcatatgaggcagcattaggggtggctatgagatgtgatatagtacagaagatatggatggagtaagtttaggttttcttgataagaatgagatttggggataaaggggtatgatcgggaaaggggtgaccagctttcttggtgagagaactactgtcttagttattctaaattataatatttttcttttggcagttatcttgtctttgcaaataatagagctgctggatccagaaacaaagttcaagaattcaaattttttactgatttagtgaatagatgtttggttacagtccctgcccgataccccattccttttagcagtgctgattactggtccaactatgaatttcataatagggtaagaactcaaaacttttttctttagatatttgtgtaaaacaaagagactttaaaaatgatagcaaaactcctgttttatatcaagagagcttttcctaggactactttcttaacattcactattattcttgactatgtttcttatttatctattcagagtctagcaatagagccctttaaggcacaattaaaatgtgcattaattattatgttatggttatgaaaatttaacatttgaagcaaaattgaagggatattaagatgtaatacatattaatgaaaaaacacgtcaaatgaaagattctattgtaatacctgtaatgttttgcttgagtagttgaaaattctactgaatgaaaaatttagtaacttcaaaataaataagaatggacttatacattgtagctgctctctttgttaatattttgtcaagcaaatatagctatacacaaggcataagaaagtttaaaattaggtgctgcttataattctaaaagtagaatctaattaatgatatagttttgtgattatcttttaaaaaaattttttttcagacaccacttttattcagtgcattataggctaaaaagctccttgctaaagctcattgtagactaaaacatatatatgttttatttatttatttttggtggggtggttttgttgctaatcaggataaccaattattatgctttgtacttctatgccattctttatcccaggatctcaaaccactttatggacattaagtcatttacacacgggcattccatgagcaagatgtagcaggtattattagccctatgacttgccgagctatacagcaagtaaaggtagactcaggaatgaaaacccagactcctggcttcttgtcagtgttctgcccatggctctcatcactagaccatatttcctaattcatatttggaaagtcactaataaaattaatggtaggaactgtaactcacaacatcatacattattataatttatacattcatatcttaaagaccattttggttttcgtgttaaaacacataggtaattggatttcacattttggttgcattcatttttcgcccccctcaacctttacaggttattttcttttatttgagctgtgttccaaagacccagcattccaaaaccttggaacggttttgttcagttatgccagctaattctggacttgcattgaggtaagaaaaacttaacattcttttggtcctctgcctaatggaataggctctttatataagattattcttgaaaacttgataaaaatagtctgttgttccactatgtcctcatgaatatatactgcttaatttcagagttgttaagccaatatttagctattcattcaaaagtcagtgtaaaaattctggtcgcttcagaaaacttcaggttacaaaggggcaaataattccattcaagtaaagttcatctgtgttccctaaacacacaccatctgtccttagcatgtgcattataagcagtaagcttgttttccacggcaagggaatattatttaagatgttttcatattttcacctaggtcagttgctctcaaatattggcaaacattagaatctcctgggatgctcatttaaaatgtagattcctgaccttgagccctcacactacatttttgaagcactgattagggatttcatatattcgatcagaacgagatttctcagcctttctttgtagtttctctgctctgatacagcaaatccactttcatccgcaagaattatgctttttaattcaaaaaggtaccctgcatgctaatgcactggcttccacgtttgcagtcattcccactgcatcagttgtatcttaatgttttatggatcataagatgcctaaaatatttatgaaatgttcccttatgttttaaaggatttacatttcatttagcatgtatgtggggaaaatcgtataaaagtttaaaaactaaagttgagacaaacataatggtagtattttacagttttcttagcaagcctgccaatctgtagaagctcattacagaaatgttaattatgaaacacctttgataaaacgtgaaatagaaaatgtcatattttgacatgattttctattgtgataggcattttagaatataggtagtttacttgtttattttgttggtaaatccctacatctgtgttttgatacttatttcctctggtcatccctgttctttttttccaggagaataaagaactttaatagttactatacatgcattttagttcaagaaacattcaagactgatcatactctaagaaagaaaaataccaggaaattgcattactatcaagccattactttaaaaaaaaattggggtgggaaacagggactgttatttggcgggaatgctttcatgtcctatagaaatacatggaccttagtgtagtttggtaagatgagcatagatcttgacttgacctcttcgtagtttgcacattcctgtcccagggtaatttttgtaagaggcattctaaaatatttgctgggtagtcttgatggaatttaactaatcaaaatttatacttcgtcattgtgctcatagagcacatttggggttcgttacacttgcaatgctttgttcattttcctgaatgtactttacaggttacttcaacatgaatgggaagaaagcaatgttcagattctgaaacttcaagccaagatgtttacatataatatcccaacatgcctggccacctggaaaatgtaatgcaacaatcatgtacatgtttttatagctattgcttttatttataaggtttgctccagacaggtaaatctgaaatgacatctatatatatatatatatatatattttttttttttttttcctggacagattgctattcttaatttagatttgtttttagcatttactgaggtttaatgagagtgagtactcattgaatagcctctaaaagcaaaaagcgtagacttttaattttctttgaaggacaacatttaggtgacagtactgttatcaaacaaatctgctacagacattttaagaccacctcttgaaatggtggtgtgtctaccctgttgtagtctgatttcttctttcttttaaaggtgttagtgctaggtatttttgactagtaattatgaggtgttttttttttgttgttgttgttgttttttttttctcctgtgaacgttatttatgttcaaaacactggtctgcttttttcttgtaaagttgataaaaattgttgaatttttcttttcactataggttttcctccttggaagtttagcctgttaactttcaggaagttttgtactcagattcccacagtcagtattctgccagtggtggtgtttcattttgttcaaagatatataaatttttcttttcctttttctatatttcttttttttttttttttctcttagagccattgctgctgagattgttctaaagggacaaagagaggtaagccatggttgaatctcagatgggtcacttttaaaaagtttttctgtctcttttgttgacttctcaatttaaaagaattaaagcacagaagttaacatttcatgcacactaagaaccaagtggggaaacaaaagtagttaacattttaagagtaccaaatattcggaaactccaaaactcagcataaccattttgtctcagatgttattgtgaattaccattctttaaacagatggaattatgaaggtgtttttcattatattttctgatggaattgtgtgtatatctatcttacaggtccaccgtttatatcagagagccttacagaagttacctctttgtgcatcactgtggaaagatgtaatgctttttatcttttattttatctcgatgttttcctgtaaattttctgcatgtgccatatccattgatgtggtaatgctcaaactctagctaagtcttacttctatgcttccctgtcttttacagcaactcttgtttgaagcatcagaaggaggtaaaactgataacctgagaaaactagtttccaagtgccaagagattggagtcagcctaaatgagctcttaaatttaaacagtaacaaaacagaaagcaagaatcactgaacactgggtgcagtcagttctaagtccttataataattgccaaaattatttgaatgattcttcaagattaggctgatccctggctaaggtctgtgtaaggcagacaagcgttattgatcatatcaagttccctacaatatcctgtcctcaaaaccggaagcaatgaacatgatcctcttcggttggataaatgaacttcctgtttggcctgcttctaggccctgccagattctcataacatcatatacgtaagtatagttcctcaaagtgactgacatttattttaattttgctttgtttttttttattttctcccccattcctttattttgtgttattcctgactcacttgacactctctgatgcctgagagattcctgtttgggatttaatatccagggctgtgtttacagtaaaaaaagcaggcagtcccttttagtttttcctttttaaatttttttgagattcttcatttcaggatttaaaactatagcagtccatcttaaggaaagtgtaactgccatggccacaagtctgctagttgcacttgaatgctctatcagggttgtttattaccctttctacgttctggactccttgccgagactgtttaacttgaagattaaagaaactattgcaaatgccagtgcatcagaacctaagagtggtcaaatattatgtgcaatttttttgtaaagaaattttaatttataataaagtttaacagtttaaagaacagttaatatttgaactgctttgtattgaaatactactttgtagtattgaaattgtttatatacttttttaatataagttaactttctaaaaactcttgctgtctttattcacttttcacactggtgggaaagggttgaagtcggagatacggatattcaccataacttatagcaatacttttttatcttgaaactgctttcccattaaa

SEQ ID NO: 628 - DNA, 534 bp, Homo sapiens; identical to SEQ ID NO: 626

SEQ ID NO: 629 - DNA, 473 bp, Homo sapiens
tttaaaagatttaagaaatgcaatttgctaacagtttaatgggtttattagggactttgagggtatatttctagaaggagaaatatttttgtttctctgaaagttctagctactttattctccatagcccttaaaaacttttcagatttgtcttcctataattcgtagagatttggaaaattagacataaggcacctgttttcttaaatgcatggttacctattcctttgtcctatcctttcaagacaattctgggaacagtttgttcagctttacgaagaaaacatttcttcatcacctgagttttcggtcacccatgaattctaagaatattttagctgatttcagggaaaaagtattcaatattagtgattgataattatatgaaaaatagaccagtaaagcaatcaagtggaaacttggtagaaatgtatagataagtgacctggtccattctgcatttttctgattca

SEQ ID NO: 630 - DNA, 473 bp, Homo sapiens; identical to SEQ ID NO: 629

SEQ ID NO: 631 - DNA, 473 bp, Homo sapiens; identical to SEQ ID NO: 629

SEQ ID NO: 632 - DNA, 410 bp, Homo sapiens
atttgatatatttttggagggatttcagggatctacattggttaagttgaatctgtaatttggttatacataaaattaaagttaatctaagtggacagaatcaatactcttgtgagtttaattagatggccagcttccaagcaagagattattctttttactatcctcctatcctctttccttaggcagcaaaataattcctttgccaaagtatgttggacagttccctggtgacaagttctatagaaactcatagctatgctgttagcaatgtgagacagaagggagggatatgtgggtgaggaggccattgtattctagagatagtaataagcctgccttatctccagatcatagcccagccaaagggatagtgtcccatttgcagaggatctgcagtcactgtttct

SEQ ID NO: 633 - DNA, 410 bp, Homo sapiens; identical to SEQ ID NO: 632

SEQ ID NO: 634 - DNA, 1426 bp, Homo sapiens
gccagttgactattattagctgtcataagtaactcagccatttggaagcatttcctggacaaaattacattatacctgtgaagaaaaatatagaagctttcaagctgtcattctgttttggccctgtgtgaatttggtatattaaattgacgcttgctttttttttcagtagagttttctttttaatcaatcaaacgcctacatttctggaagaaaaagtccaattagatcattacaccttaactaagaaggcaaatcttataaattttgcttgaattgttcttactcaaaactaccttagaatatggtatcttatgaaaatataatattcttaaaattttggaggataaaatgaaaagggtataaacttcaattagaactttaatcctaaaatattgttattcttgtatttttggagttttccgtcccttacaatttctccaaattggtctattccccaagatatccactgttttctacagattttagaatataaaattaaacatatcaacctaaaatctagctatgaatgttatttcaagagttttatatttttaattggctttttaaaaatatgtaattccaatattatagtgaatgttcagtaacttttgttgaaagataatgtggtttaggcttgctaaagaaaggcttgctagaatactaaatttaccttgttatttggaaagagaatctgctcttataacgttttaaaaatccccaaagtcccagagattagcacttgctatggattttggaactatggttcaagtctaagacaaccaatatgaataagttcaatggagaaggaagaagtagcattcagcacaagaaactgtagattgtttctcccacttgttactgcatctttgttcatttcacccatagcattgcatttgatgtctgaagtaattaccacaaaataaaggtaaactacatcttccaagatgtaccaacagaaaacattcgtctaattttgtcaacattgaatttttaggatttaaatcttgtcttaatgaagactctagggctaaaattcatggtcagttccataaaatgcatctcactttatttctgaatttttcacaacccctctattttcttacattaaagaacatctggataagttagaatagtgccaacttgtttgatttgttatatgattttcttgttaatgtgttgagtatgggaaataagggctttctgtgtgtcttgactcacaggaaaactgaaactgccaagggaagcaacattaaaacaactgggatagattgaatacatttgaaaaaataatttctggaaaaacgctatacatgccttttatgttaatatcttctttcttattaagacatgaatcaaatccatgtgggcattcaaacaaaatttatttttgggttattattctttacaagagccataaattttt

SEQ ID NO: 635 - DNA, 640 bp, Homo sapiens
ttttctttctgacagattttaaaaattgatatgataaaagcacaactgctatagattctgctgagacctctcatagtaggtatatatgagttttcacagaagactgaaaaataatgcatgatatttgtttgttttttttgataaattggcatgacagagtggggaaaaaaagcaattcacaaaaccatttcatattttttaaaatattgtgcttaaagatggtcctggaagtaaatgactagcagccaattggttttacttaacataccctcaaactgaggcttaaagtattcccttttataaaaataaatgcttggggtagggtggagtggggagggattaaaacccatccaaaaaataaataaaaactatataggtgctatgtatatctttcatctgtaaatgtcagtgtctgaacagacaacacaaattcaaatcattatacgtgtagccagaaactcaagcattttcactaaagttattaaaccaaactcctgtccaatttcacttatacaacatagtcagtctagagttgagagacaaaggtaattataaacctatttgaactagcttcttgtcttaggcctgaaccaaaaaacaacaaacaaacaaaaaacaagaatgaaaaacagaaataaaa

SEQ ID NO: 636 - DNA, 365 bp, Homo sapiens
caagcccctgggtcctggtggccgagacagggagaggcacgggcagcccagcatcgtgcagcggtttgactttgtcagtagttcttctgtggctatttgccaagagcaagggaagcagaggccggggattgtcactaactgggtatgtcccattggaagggagcctaggggctgtgccaggacacggaggaaccaacccatgtctaggctcatgtcaggcccattggttcccagacagtaacgcacacgcagctgctgtctgcaacgtgtttttaggtgatgtgtggaaaatcattctagtgtctgttcatatgtatatattgtaattaatacatcaaacccatgatgtaaacaaacttagatgt

SEQ ID NO: 637 - DNA, 366 bp, Homo sapiens
caagcccctgggtcctggtggccgagacagggagaggcacgggcagcccagcatcgtgcagcggtttgactttgtcagtagttcttctgtggctatttgccaagagcaagggaagcagaggccggggattgtcactaactgggtatgtcccattggaagggagcctaggggctgtgccaggacacggaggaaccaacccatgtctaggctcatgtcaggcccattggttcccagacagtaacgcacacgcagctgctgtctgcaacgtgtttttaggtgatgtgtggaaaatcattctagtgtctgttcatatgtatatatatgtaattaatacatcaaacccatgatgtaaacaaacttagatgt

SEQ ID NO: 638 - DNA, 149 bp, Homo sapiens
ggtatcaggtacctagtatcaggtgtacatggctctggtgcatagtcaggcttgcctgtgtatacatgaatgtacacgattatctggtaattagtagtagaagagattccaaatgccttattttttcaacgacactgcatggtgtgcat

SEQ ID NO: 639 - DNA, 3619 bp, Homo sapiens
gggaagccgagccatgtagtaaaacagacagccccttgacaggcggtggggacctcaccaccctcagcaacatcgtcttcatggggaccctggtgcagtatgggaggggccaggtaagccctgggacaccgaggccttgggctcccgtaacccacaggctcccagcccttagatttcatacttctctctctcctggacacagggggtcgtgattggaacaggggaaagctctcagttcggagaagtgtttaagatgatgcaggctgaagaggtaaggggcaggagggggcttcgggacttttgtaagctggagtttgagattattataggcaaataataccagccttgcctactccttaggaatgagtggcatgtggttcatatgagtatactttttaaacatttattttttttttttaatagagacagggtttcgccatgttgcccaggctggtctcaaactcctgagctcaagcaatctgtctgcctcagcctcccaaagtgccaggattacaggcataagccaccacacctggcctcttttcaaacacgtaagacatttgttagcattttgataaagatacagctttcagacagtaatacgcacagatcttcagtgcaaaagtcaatgaatgttgacatatgtgtacccctgtgtaatcatcactgaagttgtaggatggcaaggtgaagacattttgaacaaaggcaggcagaagctaggatcttgtccaactaacccattgtgctcaccctttcagacacctaaaactcctttgcagaaaagcatggacaggctaggaaagcaactgacactcttctcctttggcataatcggtgagtgaagcagtttccatactgggtttgttctgcagatggaggggagccatcataggggggttgccatggccgtttctcaaatatcttgctactcagctgcataaggcttggggattgggatcagaggctctccacaagcaacaagagctttctgtatagttggaccaggctggctgctgtaacaagcagccactacattttcttggcttaacagagtaaacgcttgttccttgctcacaccgcagtccaaagtccgtgggtgtattcctggtccagtggctctcctggatagctcgcctacaaacagtgacttgggcccaggcccctgttacattgctgctctatcttcctctgggtccttggaggccatgtttctgttcagccagcagatggtgaaagaggaaacatggaggcttgtggaggacatttttaaggcatagaccaggaagtggaatcatcaatttgaccatcttttattggccagaatggagtcacatggcctacataactgcaaaggagactgggaaatgtagtttatctgtgcacccaaacatatttctatgcttctaagcaggctgttcctggactgggacttcctgacctttggtaacacaacaaacagcattgacatgatgctgcggttctgaatctagatcttaaggcttgacatccccatagtgctgccccagtcccttctggggcttcttcctgctctttccatatctggccttacttctgtgtcctttattccagcctttaggatcaacccatgcctggcccctaatagattctcagtaaatatttgttgagtaaaacatttaatcaaggaataaaccaacaagccactgcctatagcacatctagtgatgaggggggtgctggtgagtgtagccaaaactgcgaagccagagaacagtcttgagagaaacagcttatgtaagcccatgtttcttaagttaaattagaacttaaattgacatgtccacagcaagacccatgatatcattcagacattttttttgagggggcaggaatggagtctcactctgttgcccagactggagagcagtggcgtgatctcagctcactgcaccctctgcctcctgggttaaccaattctcctgcctcagcctcctgaatctctgggattacaggcatgcaccatcacgcccagctgatttttgtatttttggtagagacagggttttgtcatgttggccaggctggtctcaaactcctggcctcaagtgatctgcccgccttggcctcccaaagtgctaggattacaggcatgagccaccgcactgggctttttttttttttttttaacattttgggaactgctctagcagatggagagttttgacactcagtcccatggaccccctagaaggcccaaggggcaggtgcagggaagcaacaccatgctggtcagtgcttctagaggaaagtagcatttgccaattcccatggtgcaaatactctcagtgtggccgttttcaagctactaatgtatagacacagaacatggatttcggaagagatgtacctagttgattcttgtgagctcctgtgaggagtctccagccttctactatgggaatgccacaagggtggagtgagtacctagtgggggtggctctaggctcactgcctcacccctatttccaatagagctccccttgctaatctatttcatttgagttcatttgggttctagctaagatttcagctgatgactgagtttagtagccaatagtagaatgcccaaaacaaaactaacagatactgtggcagctgcccccctcaatacatacacacacacaccccgctaccatccatcagaaaacatccctggccccctggcccctgcaaagcaaagctaacgttctttagcaagctctccaagggtgtcacctggcaacaccacccaccttcccagtccctactcacacctccgtgtctcgtacacctagtgcagtaactggtgtgcagtacgtatttggtaaattattaatgaaggaaaatggaaatggagtatatttaatcatgagtaccacagagtaaaataatttgaaaaaacagtgacctatctgcccatcacaggagcagttgcatttgccacaacaaacaccacatggggggatgttctggatacacgcagccgacggtaaactttgggaataagatgtaaatgcttgcgaacagtccaaaatagactgattgagccttttacttaaatttggcttggacctttcctaagaaagtaaaatcgggtttttgtaggtataaacgtatctcccttagaaaagagaagagacgggttgaaagtggttgaggttatcaggcgttcctctgtgcatgcattcctgtaaactctttaaggaagtgagtttgaatccctccaggcatcagcgtgtgtagtgcatatggagataaggatgtttttgtctcttccccaggtctcatcatgctcattggctggtcgcaagggaaacaactcctgagtatgttcacgatcggggtcaggtaagagtgctatggccgccccttgccttgccagggtggtcaatgggctctgagcccttccctgccgcaagagaaggtggggaggctgcagaataggaagggttgggaaggtgcagccccgtcacccaaactccagcctcccaatagcacgttctccgacaggtacagagtgcccggcgaatgcttgcaaaatgaatgacagcaaatgatccagggtgtcccttttgtattaggctgttcttgcattgct

SEQ ID NO: 640 - DNA, 451 bp, Homo sapiens
cttctaagtgaatatgatactgactgtggcctgttcaggtctagttaagaagaccctcctggtgggttttacagctttgtatttctcactgtgtcttgcacaaagtaggtgctcaagatgtattaatgaataaacattatttcagcaaacagacttcttaaattggtgcctagctacaaaggcaccattagggttttgtgccagctgtatgaatagtaagtcaataaggtagccataaaaaatgacagcatccagaagcacaacaatggaggatagagaagacaaaattttaacaggcaaatagaaaagctgtaaaattatatcagagagagagccttttgtatagaggcctaaataccttatttgagtagcaaccctaagttgaaatttctgaatttctcaaaagaacctatcctgctgtttaaattggtgacttaaaactagacctggt

SEQ ID NO: 641 - DNA, 2212 bp, Homo sapiens
tgcttctttaatttgttccacaaaaattatgctgaaatggacctgaatcagccctgggtgtgcttctgttggcgcctgctgctgaggcccggcctgcccatcggcctgtagtacgccatcgaggtcatcatggagccagccagcttctcttctcatcaaggaggcagagacccctggtggaagccaagagtgaccgaagagggcttgcatcacgtcactccagtggttccctccttgtccaagtcctcgttttaagggcatggcccgttggctccagccgttggcttctgttcagggtccttgctcccatcagaggtgtttgattttgctcctggggctgcgatggagaaccttttgtggcagatggtgctgcctacatctcattggttctctgtacctgtgcccgttgcgcatgttcacagacaggagagtcgccagcaataccttggcagcctttaaatgtgaaacgtctgttacttgcgctggaggcagaggctgtgcagggagcctgcttctaatcgtgggctcccttatctgttacggttccctcccctcctgttctagatgctgattcgttttctcactggctggttaattgctgtctacttaggcctccaaggccataactgtgcaacattttatctgagaaggaaggaaggtcagaaagtgatcactggcaccaccactgtggcattcctgtcacaccaacacagaaattcacagctcatactgttctcacctgggaaacttgggaagggctgatgagtttggggcagatcctgaattgcagccacacttggccttctagaagctgaagttgtgccctcaagtggtcctaagtagaagtccacttgaggtatttgctggcacacaccctcaagggtggttcagaaggtcctgaaacctaaggcaaaaggctgctggggcatgaacagaacagaccgtctcaggggcagccatgtaagtggcaagcagggctggtctccctcaaggtggttcttcattaagtaaagatggcttcgtgactagtgtttagctcccagatttatatttgggttaaaaactaacttttcaatgtggcagtttcaaaggattacttgatgcaaagtatgtttcctttcaaagggatcttgacgtggtaccaggactgagtcatgatttgggcagaggcagttaacactgggaagccctgcccctccctatgcccccttcactccggggaactgaaacctactctgagtctcacatctctaaacctcagtgctgagacctatgcagtgggactaatctcatcaagaattttcagttgaggccgggcgcagtggctcacgcctgtaatcccaacactttgggaggccgaggtgggcggatcacctgaggtcaggagttggagaccagcctggccaacatggtgaaaccccatctctactaaaaatacaaagaaagttagccaggtctggtggtgcgtgcctgtaatcccacttactcgggaggctgaggcaggagaatcacttgaacccaggaggcagaggttacagtgagccgagatcgcgccactgcactccaccctgggcaacaagagcgaaaactgtctcaaaaaaaaaaaatttttcatttgaggtattcttccagtagaaggttagtaagtttttaatgaaaccattaaaaattacacttcccagaaaatagatgacatcagtgccccttgctactttctcagtcctcactattgctttgagggcccaggtactgaaactggttgtcttgagttttgtgtcagctttttctccagtccattatccccctcccttgcttctgaagcagtctaggttaaactagccaggcaggtagttgtggactggtgattttcaaaagccccactttagagatcaggccacagctttttatatcgcacaggacacatcagcctgagctgctgcctcatgcctgtttccccaggaacctcactcctttggtagaaccttgggattttagaaattgtggcttttccataactcatttactccaacagttgaagttacacacattgctcccaaatttggaaatagaccacagtaccttacctttcattccccatctggcctttaccttctttgcttcagtggttgaaaacagttgccatattcaaagtatagtagatttcaacctcacacaaatgacaagtcccattttacaatcctaggaaggccca

SEQ ID NO: 642 - DNA, 16892 bp, Homo sapiens
tgcttctttaatttgttccacaaaaattatgctgaaatggacctgaatcagccctgggtgtgcttctgttggcgcctgctgctgaggcccggcctgcccatcggcctgtagtacgccatcgaggtcatcatggagccagccagcttctcttctcatcaaggaggcagagacccctggtggaagccaagagtgaccgaagagggcttgcatcacgtcactccagtggttccctccttgtccaagtcctcgttttaagggcatggcccgttggctccagccgttggcttctgttcagggtccttgctcccatcagaggtgtttgattttgctcctggggctgcgatggagaaccttttgtggcagatggtgctgcctacatctcattggttctctgtacctgtgcccgttgcgcatgttcacagacaggagagtcgccagcaataccttggcagcctttaaatgtgaaacgtctgttacttgcgctggaggcagaggctgtgcagggagcctgcttctaatcgtgggctcccttatctgttacggttccctcccctcctgttctagatgctgattcgttttctcactggctggttaattgctgtctacttaggcctccaaggccataactgtgcaacattttatctgagaaggaaggaaggtcagaaagtgatcactggcaccaccactgtggcattcctgtcacaccaacacagaaattcacagctcatactgttctcacctgggaaacttgggaagggctgatgagtttggggcagatcctgaattgcagccacacttggccttctagaagctgaagttgtgccctcaagtggtcctaagtagaagtccacttgaggtatttgctggcacacaccctcaagggtggttcagaaggtcctgaaacctaaggcaaaaggctgctggggcatgaacagaacagaccgtctcaggggcagccatgtaagtggcaagcagggctggtctccctcaaggtggttcttcattaagtaaagatggcttcgtgactagtgtttagctcccagatttatatttgggttaaaaactaacttttcaatgtggcagtttcaaaggattacttgatgcaaagtatgtttcctttcaaagggatcttgacgtggtaccaggactgagtcatgatttgggcagaggcagttaacactgggaagccctgcccctccctatgcccccttcactccggggaactgaaacctactctgagtctcacatctctaaacctcagtgctgagacctatgcagtgggactaatctcatcaagaattttcagttgaggccgggcgcagtggctcacgcctgtaatcccaacactttgggaggccgaggtgggcggatcacctgaggtcaggagttggagaccagcctggccaacatggtgaaaccccatctctactaaaaatacaaagaaagttagccaggtctggtggtgcgtgcctgtaatcccacttactcgggaggctgaggcaggagaatcacttgaacccaggaggcagaggttacagtgagccgagatcgcgccactgcactccaccctgggcaacaagagcgaaaactgtctcaaaaaaaaaaaatttttcatttgaggtattcttccagtagaaggttagtaagtttttaatgaaaccattaaaaattacacttcccagaaaatagatgacatcagtgccccttgctactttctcagtcctcactattgctttgagggcccaggtactgaaactggttgtcttgagttttgtgtcagctttttctccagtccattatccccctcccttgcttctgaagcagtctaggttaaactagccaggcaggtagttgtggactggtgattttcaaaagccccactttagagatcaggccacagctttttatatcgcacaggacacatcagcctgagctgctgcctcatgcctgtttccccaggaacctcactcctttggtagaaccttgggattttagaaattgtggcttttccataactcatttactccaacagttgaagttacacacattgctcccaaatttggaaatagaccacagtaccttacctttcattccccatctggcctttaccttctttgcttcagtggttgaaaacagttgccatattcaaagtatagtagatttcaacctcacacaaatgacaagtcccattttacaatcctaggaaggcccaccaatttcatttcacgcgccagggcggctgcagttggaggccgagggcagccctctgctcactgaatgtcttgcatgtgctgactgctgcccgcagtgctgaacatgccccaccgcccaggcccagcactgcttgttgggtcagcatctagtgctgctgtcacatctttgtctgcacagccagtaggattgcctcagccagggggtttatcagaaggtgtgcaaggcctttgggggaactgagcccctatagtgggcagtctcctttaccttcccacctccctgaaaagcacagaagacagtgccttggtttgtgttttgaagcaaacaagtcagctttctggctttgccccaaaactgtgatggaacataataaaactggagatatggtttttaacactgcaaaaaggaaaaagcatcaagtttctacttctggctggaaagcaaaaccaatctcagctgacaaggctgggcaaactaagttttcctgagcccattttcctttgagccctgacctagcctggccttacctcattaaggtttggttaaagcagtggaaaggaggaggaggcaggggtggatgggggtgtggggaggggatgagcactctgcagccgattaatctgttggtaggggcccagcttcttgggagtgcttattcagcccaagagtggaggctgtttacagcgagccctggagatggcagcttgtctccagctggggaggggtcaggcccctaaattgaagaccactttggtagcagaactgtagggactggtgagtcaactcacagattctgcagcagctgctccacccacaataaagcaaacgccgacaggctagaccccagattgcaggggctgccacctacaaggtgggaccacaggctgcctcaccgggattgtctgccactaaatagctggagtcacagattgagataaatgccaccttcaaggttgcagtgaaaagcataatcctatgtgatgaatttatatgtgttattttttaaaaagctattttattactgcatgttcccgtcccgtcttgtgaatgtgagtccccgccaccacgtgaggtgcagtcgttgcagcggctggtgcaggagtgcagctggcgcgtgtgtgatagcatctcgtaggtgttgctgcacaagagttaaccagagtcaatgccaaacacatagtatgagaagtgtactttttaagaaattaatttatttgagttcaaatatttttgaaatataaaaattggttgtattttttaaagctataattcttgtagacattctgtggttaaaaatttgattgtgcttattaaaaatggtcatctatgttttgcacttcagctacgtgaaaataaaatttctttgggaaggtgacatttggcttcctgattacgggagggagttggttatctcaggtggagcaggaaagcctggttgattctcacaccaggatgggactgggacttcccaggatggagggaggaggccatttctacaccatactttgagctactgacagcaaaaccctcccaccatactgggtgcatcttgtttactcttgactaacatacacttctgatttacagcagaagcctcagaagctaattcagttctcctttggcatgccactggataacaagatagtgagggggcagtgtgtacaagctgtggacatgggcatttcctctctgttgcagcaaggcggaggaaagcccagggagagtaaaacgctacaatctttctaacagctttgccctacaccaccatctaaatgattatgaccaagtggcgacatagtattttattttcctagaattatgtccagctgtgagaaagccaggttcaaatttaaatcctttaataacctgtcccagaattactaacaatgagacttaaacaaattttgatttgtgaagaaaacatgaaaaaagtccaaaagaaaccccctcaaagggcccgagtgtcaacagttcccctttggagcagctcatccatctctcaggtgggggtcctccggcaggcagcttcctctgtggcgccaggtgggtccagagtgggcccgctcctttagaagtcaggcaggccaggcagagggaagagagaggcgaagctctcaacctcctcccggagagcctgcacggccgcctggtacttatcccctgccagtctctccttgaactctttcagggtggctctgacaccagtgtcgctctggatctgcagggtcagctctatccctgtgccacaagacacaaatgagtcaccccacactacacaccaaagggggtacaatggctgggggccgaggcacaaatgtcagaatgtcccccagctggggagtgtggcagggcacaaggtctccatgcttacctcaattactctgagatgcacccacccttggacagatgtcctgggcagcccaaatttataaccctctcagacaaggtgatttacatgtgttttttgctgtctcccaccccaacactcagccttggtgcagaattgtctttcagtggcagggtctcagctactcatcacaatcagaaactaaatacacacaataagatgtggcaacttccaaacttttatccttacctctgtgaataaagtgggctactttttggaagtctttttccaaaagtccacgggacgtcagtgctggggtccccagccgcagtccactgggccgcagagcgcttctgtcacctacaagataaacggggctctgtccctaagtcacattgtcaccactgtgatggtggtgcatttaaaaagggacatgtgggcaaaagagaactggcctgaggatactggctgtccctagcaaggagtacaactgattcagaaactaaagtagaacccaaggcacaaggaggcacaaccacgtttggccactctgacttaattactagtacacaaagtggtctgatgtgccccttgctcctaaaaatgagggtaacatctgtctgggtctgagatgcgtcatcaatattttgttaacaacccacagagaaatgcagcctctggattccggaggccctgacctccctcatctgatgaatgtaccacctccaacagctctacatcagtctttttgctccctggcagggtcagggccaagtacaaaggcacagccaagagacagccaaggtatggtccctgcccccgctccattttttgtttttgtttttgtttttttgagacggagtctcactgtcgcctaagctggagtgcagtggcgcagtctcggctcaatgcagcctctgcctcctgggttcaagcaattcttctgcctcagcctcctgagtagctgggaccgtggtgtgtgccaccacagcatttttagtagagacagggtttcaccgcgttagccttctcaatctcctgacctcgtgatccacccacctcggcctcccaaagtgctgggattacaggtgtgaaccactgcacctggcccagtttttttttttttagacagagtctcattctgttgctaaggctggagtgcagtggtacaatctccactcactgcaacctctgcctcccgggttcaagcgactcttctgcctcagccttccaagtagctgggattacgggcatgcaccaccatgcccagctaattcttctatttttagtagagacaggatttcaccattttggccaggctggtctcgaattcctgacctcaagtgatccgcctgcctcggcctcccaaagtgccgggattacaggcgtgagccaccgtgcccagcccccactacagtttttatgtgaggtctgtccccggagccaatatattcatcagctacaactttggccagaagaaatgcagatgggagaggagtgaaggagaaggcaaggatgattctcacctggacaggtgttcttgttgcaggcaatagaacaggcttctagcaccttctcagcccttccaccatctgtgcctttggaacggagatccacaaggatcaaatggttgtcagaaccacctggaaacaaagttggacatgtagaaatgcaggcgaattctatgccgtgaaggaatctctgagaaacgaaggcgaggatgaaggcagtcaaagcagatgaggtcaggaaggtgagcacccccaccacatggcctgggattctaatccccacgagagatgcccgtgcctaagaatgtgaaaggaaggacagagcacttttgaaaggggtaactgatcatacagcagagggcctgacactcccatggggaagggacagcttcctcaggctgctcctggcttgttttctctgacaagttgcttgggcaattccctaacattgatggtaaaggctcccctgaaggcagcatgaatattgggcagcagttcaatttactttggggggtaaggggcatgttcacagagcacattaggtgccagacactgtagcctgtggtaggtttttcccggatcctgtgaggctgatggtattatcaaagtggtaaggtgacaacagcaaggctaacagagttttctggacctggcccgaggtcatacaggaggatccttccactttgaaccttcattaagctggggtagtgccttgggtgctgacagcactggggcctctgcttctgagctgtgttgcggggatccctttcaagatgcgggtgagctagggctccagcttggctttgcagccccccagctgtgcccacccacttgccgtgtggctttaggcaggcagctcaacattgtgaaacctcagatgcccatttgtaacaaaaagaccaataattcacagggctgtcatgaagtttaagtaagatactggacatagtgcttctcatagcaccaggcaccaaagagggcatttgcaagcattatctgtctcagccatgtgcatcgggtcctcagatggcagagtgacaatgacacagtcaccagggagagggcaggcccatgccatgagatgcccatggtgacagggactatggcctaaaccctcacaactccaagggtggctcccagaccagcatcacccaaggcctggtcagaatctgcattgcaccaacagccccaggggtggtgtgcacattgaagtttaagaaacagggacctatagcagtggtccccaacctttttggcaccaggaactggttatgtggaagacagttttttcacggatggcatcgggggatggttttgggatgaaacttccacctcagatcatcgggcattagattctcataaggatgcaggtataatcagaaggaaaaaaaagatagtttcttgaaagtgtctaggcccaacctagatccctcacatgtgcagttcaaaccagcgttcagctcctctgagaatctaatgctgccactgatctgacaggaggcggagctcaggtggcaatgctctcggcccagctcacttcctgctgtgcggccaggttcctaacagaccacaaaccagtactagtccgtggcccggaggttggggactcatgagctaaagcaccctgaagttcacagtctgcacgaggacttcttgagctttattatttgaagacatggaggatgaagggagaacagaaagtaagtgaagtagaacataaaagagggtacggctggtactgctgaggagacagcactggcccggccttcccaggcactgccgcacatgcaggattgggtgggagccccactccttagaccaggaggcctgtaatccctccccaatccttagatcagagggcctgtaatccctgtaaagggcaaaggacacggtgcagagagtgggcactcaggtctacacacagcaggacccatattcctggaccacaccactgctagcacaatcggcagtcttgtgggactaggtataaagtcgcccttcctccggaggactgagtatgctgcctgccaaaaaaatgcgttctccgtggaaagctgcagtgactgtgaggtggatggcaccccagagtggggccctgacctgggaagtccatctcattcacagcccatcagctccagaatgtacagatccaagcaaacatgcctaaagcaagccaactccccaggaatatgcaggaaactgggaggggagagcccctgcacccccagctcagcggggtgagagaagacactcccctggcacagtgcaaggcatcaccacacagtcctggtgccacctaccaggtgtgtgaccactacagcccaacctctcagttgagcctcaggtcatcctcctgcaaagctgttctgaggacaagcagtccttatgctggtgaccaatggcaaccactattcccatcatctgtggctcacccaagggggcggctggctggtctgaggcagggggaggctttccagttggaggcgaggctgacctcctcccaaggtgggcccatcattgcagctgcagcagcagagcctgggccacatcctggttgcacaaactgagaagcaagccttaatacaaccacaagaacaggcctgctgaacaccatctgtgtctctacctgtgactattttgtagcccagctccgtcagggcctcagacagagccctgcagttggccaccacctggtgttgataaactttaaattccagagtcatagcttgcttcagtgccacagcaacccctggacaagaagagacaatgggtcaggaggctaggatagaatcatacacagatgatgagtcaaacaacattcctgtttttactcaagcttccttgcttttcaatgtcaccccttgcttttgcgttggattatcttttcctccaaaatgatatatttttaaaaattttttattatttattatttttattttttttgagatggagtttcactcttgttgcccaggctggagtgcagtggtgtgatctcggttcactgcaacctctgcctcccaggttcaagtgattcttctgcttcggcatcccgaacagctgggactacaggcacatgccaccatgtccagctaatttttgttggtatttttagtagagacagggtttcactatattggccaggctggtcttgaactcctgacctcaagtgatccgcctgccttggcctccccaagtgctgggattacaggcatgagcaccatgcccagctaaaaaaattttttatttttatattttttgagacagggtctcactcccattgcccaggctggagtacagtggcgtgatcacagttcactgcagccttgatgttcagggctcagatgatcctcccatctcagtctcccgagtaggtgggactacaggtgcatcctaccacacctggctaattttttttgagagatggagtctcgctctgtcgctgaggctggagtgcagtggtgcaatctcggctcactgcaacctccgcctcccgggttcaagcaattctcctgcctcagcttcccaagtagctgggactacaggcacgtgccaccacatccagctaatttttgtattttttagtagagacagggtttcactgtatgttggccaggctgttctggaactcctgacctcaagtgatctgtccatctcggcctcccaaagtgctgggactacaggcgtgagccactgcgcctggccacgcctggctaattttttatgtttttggtaagagacgggctttcttcatgttggccaggctggtctcaaactcctgggctcaagtgacccacccacctcagcctcccaaagtgctgggattataggcatgagccaccgcgcccagctgatatgcttctctctgaggaactgctgttgaggtaacctttccctaagcatggaagttctgtgctaacattaccataccaaagctgttaagcaagatggattttacatcctttttaatcttgatgtgtgaaaacgattacttagcaggcctaagagccgatgctctgatgccagattatgcagctctctaaggtcagagcgcaggtaggaggtgcagccttcgtcctaccctgcaccattcagacttatctggtatctcacattcaatcctgagggctgcttcaagggacacagagaatggaggataaggagaacccacgggcctgcatcccgcacagagcctccaatcaatacttgtgaaaacaactggaaagggcgtccagagcagctggggatggggtgatccctgcatcccagagttaaagcagctgtgggtgccaagtgtgtaggtgtgatgggagaacatgagaacacacccgggaccccagctccttccaccccttatgcctaatatctcccaatcgctgctgtccccaggttcctctctagaagtgcttgtgcgtctcctgagaagctacaccttcatcctgagccccttagcgggaatgagtgctaccaatgtccttgttccatgaaggcagcgggataactcttgagtcatcacaaatgtcctaagctacttgtacaaagagacaaagagcaagtcaatgagaacctgctgggcaggcatggaatctgactcaggagtcactggcgtggcactggtgcagggtgtgaggatcagacacagggtcctccactgccacaggccaggcccatcaagggcaaggggactcatcctgcagggtctggaccccaatctctctcacctgtgctttgccctctcctaactgtcagattccttccctaagagggtgccatgtactttacaaaactcggcctgacccacaggtttgcctctgggtggccgtacacgtggagtggatgccattccctactgtccctaccttaggccagtctcaaccatgccctactctgtgttagcatctcctgcacagagacagccctccagctttttccccagcgtggaagtcctggcacacgattttggaggacaggtgggatgggaattaggggctacaggatgagcagaggcagatgatgttttaccagcaatggcgtggttgtggggacctccctgcaggccagggaacacagcagaattgataagagactccaggttgtacagaatctctttgccagtcttgggatccacacttttcactcctggaggaagaaaaacatcacagtgggatcataggggctgtcccctctttttctttttaggctcaaacccagactggccagggaagaatcaagcacaagcctggcctttatcctggcatggagaactgatttgtaacacagcggagcagaggggacccttgcctcctgagggcagaccagtatctttattttttggaaaccaacacatcatggatgactctggctggaatactggtttcagcacctcacctgtccacctgcctcctctgatggcatctcttcttaacacaactagaacaaggccttaaaaatgaaaggacaggctggacgcggtggctcacacctgtaatcccagcactttgggaggccaaggcgggcggatcacgaggtcaggagtttgggactagtctggccaacatggtgaaaccccgtctctactaaaaatacaaaaattagccgggcgtggtggtgtgcacctgtagtcccagctacttgggaggctgaggcagaagaatcgcttgaacccgggaggcagaggttgcagtgagccaagatcgcgccagtgcactccagcctgggtgacagagtgacattctgtctcaaaaagaaaaaaagaaaaaaaaaggacagaaatttccctccactaacattgtaaccaagaattcaagaatttgccctggacatctttccttaaagaaatgtccatgtggctgggcgtggtggttcatgcgtgtaatcccagcactttgggaggctgaggcaggtggatcaattaaggtcaggagttcaagaccagctgggtcaacatagtgaaaccctgtctctactaataatacaaaaattagctgggcatggtggcgggcatctgtaattccagctactcaggaggctgaagcaggagaatgcgttgaacccgggaggtggaggttgtagcgagccgagattgcaccactgcactccagcctgggcgacaagagcaaaactccatctccggggaaaaaaaaagtccatgtaatcccagcactttgggaggcagaggtgggaggatcacttgaacccaggagttcaagaccagcatgagcaacaaagagagaacccatgtccacagaaaaatttaaaaattagccaggcatggtggcgcatacctgtggtcccagctacgtgggagggtgaggtaggaggattgcttgggcccgggaagttgaagttgcagtgagctttgattgcaccactgcactgcagcctgagtgacagagtgagaccctgtccccaaaaataaaatttaaagagtctccaagatgcattgaaagagacaacgctcatgtggctaatatgaagaataaggttcctttctgagaaaaagttaaccatcaataatagctactattcagtcataatcggtaacatctatctagagcttctagtgagccaagaactgctctaatcactttacataaattcatttaatcctcaaaacagcagtccaaagggacaggtactattattatagtccccactctagaggtgaggaaatgaggaacagagaggctgcacagctagccctaaagtcatacagcgggtgtgcggcagagctagtacttgctctgataggctggctccggagtccctcagcactgggtgaaataaatcacatcaacacacagtgggggaaaaaaccaaatgtctcctgggcgggtgggaatggctacctgcctcagaaacatcagcacagctaaaaacggtccttggaggagcacagaggcaacggggtgctgagaagctgagggggcatgtggctgtgtctagtcccagccaggggctgggcaagaagaccctgcctcgggtaagagtaatgtagtcgaacagccctctccctctccctccccctccccctccctctccccacggtctccctctccctttccacggtctccctctgatgccgagccgaagctggactgtactgccgccatctcggctcactgcaacctccctgcctgattctcctgcctcagcctgccgagtgcctgggattgcaggcacgtgccgccacgcctgactggttttcgtatttttttggtggagacggggttttgctgtgttggccgggctggtctccagctcctaaccgcgagtcatctgccagcctcggcctcccgaggtgccgggattgcagacggagtctcgttcactcagtgctcaatgttgcccaggctggagtgcagtggtgtgatctcggctcgctacaacctccacctcccagccgcctgccttggcctcccaaagtgccgagattgcagcctctgcctggccgccaccccgtctgggaagtgaggagcgtctctgcctggccgctcatcatctgggatgtgaggagcccctctgcctggctgcccagtctgggaagtgaggagcgcctcttcccggccgccatcccgtctaggaagtgaggagcgtctctgcccggccgcccatcatctgagatgtggggagcgcctctgccccgccgccccgtctgggatgtgaggagcacctctgcccggctgcaaccccgtctgggaggtgaggagggtctctgcccggctgccccatctgagaagtgaggagcccctccgcctggcagtcgccccgtctgggaagtgaggagcatctctgcccggcagctgccctgtccggcaggttgggggcagcccccgcccagccagccgccccgtccgggagggaggtggggggcagcccccgcctggccgtcaccccttccaggaggtgggggggcgcctctgcccggccgccccttctgggaagtgaggagcccctctgcccggccgccccttctgggaagtgaggagcccctctgcccagccgccaccccgtctgggaggtgtacccaacagctcattgagaacaggccatgatgacgatggcggttttgtcgaatagaaaagggggaaatgtggggaaaagatagagaaatcagattgttgctgtgtctgtgtagaaagaagtagacataggagattccattttgttctgtactaagaaaaattcttctgttaatctataaccttacccccaaccccgtgctctctgaaacatgtgctgtgtccactcagggttaaatggattaagggtggtgcaagatgtgctttgttaaacagatgcttgaaggcggcatgctcattaagagtcatcaccactccctaatctcaagtacccagggacacaaacactgcggaaagccgcagggtcctctgcctaggaaaaccagagacccttgttcacttgtttatctgctgaccttccctccactattgtcctatgaccctgccaaatccccctccacgagaaacacccaagaatgatcaataaatactaaaaaaaaaaaaaaaaaaaaaaaaaaaaagagtaatgtagtcaccagagggctggtgtctctgctgatgcaaagttggcgcatcaggtctcaccacaggctaaatgatgacctgaccactaacaggctttcccaggtatgggaattcgaaaataaggggagtgcctaggggtaggttatgaggtaatggaaagaaaaaccttcactaaaatgatattaatgtttatacatccatgtcttctagtttgactactatgagtctttctctttgagaaacatgatggatcactgtaagttcaccagaataatgcagccttgtgaggcctcccagtggcccccagccagccatgcaccctcctttcattcaaacacctgcctctcgagttcagcaaccggcgccatcctaacacatagtggttgctgatccccctcctatgttcctaggacctggatgcacaaaagtgaagcaggagctgtggctgacagtctccttctggggattcctttctttctttctttttttttttttgagacggcatctcgctctgtcgcccaggctggagtacagtggcacaatctcagctcactgcaagctccacctcccaggctcacgccattctcctgccttcgcctcctgagtagctgggactacaggtgcccaccaccacactcggctaatttttcgtgtttttagtagagacggggtttcaccgtgttagccaggatggtcttgatctcctgacctcgtgatctgcccgcttcggcctcccaaagtgctgggattacaggcgcgagccacctcacctggccgggaatcctttctgtaaagcctgtcactgctccttcctaagcagctctttaagggactgggatcttaatattttccaaggatcccaggtcagagtttttcccagctccctcaactgaatctgaacccccacaggagaaatgtaaaccatggtacccatctgtacccaacattcgggagctcacctttcctgtagaagatcatgccagctcggcagcctcgcagggtcttgtgagtggtggtggtcaccacatggcagtgttcaaatggggagggcaccacgccagccgccaccagcccgctgatgtgagccatgtccgccatgagatacgccccgttctcatctgcaatcttccgtagccgggcatattccaggtttcgggagtagcagctggttcctgagacaggaaaggtgacacagctgcatcagagatgtccaccggccagctgagttggcttcacagtggcctctagatgtgcagatctgaaagcccagagatttcttcccttaaagtctcagagcaaaaatggagaatgccctcaaaaagcacctctgtgctaaaggcaaccactctaactcttcaacgtcttggtggttgagatggccccaactactattgccagcgcagtcagggcctgacatttctagatgcttctctgagaacagtctcacatcttaatctacatagcacaaaaagcagcaaacacacatctgtatcctgaaagaaactaatatatgtagaccccagaaactcagttatccagggcagaaactagcagtgggctcaacagggtgcgaacatctttccatcctcattctgtaagaggcaccaggctactggtgaacaaggtgactttccgccccgcgcatcacctgcgatgatcagcttcgggtggaagaggcgtgcgttctcctccagctggtcatagttgatgtagccagtatctgggttcacctgtggaatgtcagggaggcaggttcaggctgcttcctccaaccacacctgcctcctgtcctcccacttgaactggctccacccaccatgacaagaggaatgatgtcctagatgaggacttgagggtgagacaggatggatactggtgtgttcagcctgctcaaccaagtatggctcacagacccaggagtccctgaggagtcccagggttgtagtgagccctgctgctggggcactacctgctgagaaggaaccaaaaagcacctgcagaatgaaacaaatgtgacgggaccacacaatggaaaccaaaatggttaccttcaggaacaagaccaaaatgcctgctaatactacttctattccaagtataatgaggcaagaaaaagaaacaaaaggcataacgattaggaaagaagaaatttaaaaactgacattacacacagacaacacaatatacctagaaaatcaagatgctaggggccaactgttagaataagcaaatttagcaaggtcactggatacaacattgaaaaacaagaagtagggg

SEQ ID NO: 643 - DNA, 119 bp, Homo sapiens
ccagtacctggctgagctgctgaagctgcactacatgcaggaatctccagggaccagccaccccatgctcaggtttgactatgtccccagctttttgtataaaatctgaggtcggtccc

SEQ ID NO: 644 - DNA, 115 bp, Homo sapiens
cacacctgtaatcccagcactttgggaggctgagacgggcagatcatgaggtcaggagatcgagaccatcctggctaacacggtgaaaccccgtctctactaaaaatgcaaaaaa

SEQ ID NO: 645 - DNA, 119 bp, Homo sapiens; identical to SEQ ID NO: 643

SEQ ID NO: 646 - DNA, 841 bp, Homo sapiens
acggggtttcaccgtgttagccaggatggtctcaatctactgaccttgtgatccgcccgcctcggcctcccaaagtgctgggattacaggcgtgagccactgcgcccgcccggccaacttattcaaagtcttaatctgtccatgtgaatcgaggttaaagcagtagcaacaacaacaaaatgctatcattagtaaatgttttgtttattacttagtgttaacagagctctcagagtgtgctcttaggaagacacgcacctcttaaggtaggtgtgtcttgcttagtgaggttgaacaaatcacagtccaggcaatcttcattctgcatgatggcattgctgtcttcatatggacagacaagtagaatgatgttggaaatcatgtatttagaattagacagtaatttaatttttttttcagaatgcacaaggatgttgtttcttggagtataagagaattgaattttagcttagagccactttactgtgggagcaactttttttaaattgaaaatttctaagtgtgacctctgttggcatagctggtattctttgaaagtaattaaaatgaaaagtattaccagtccatatcttgtgtaaatcttttgagttagcatgtttagaggaggtaggactggtgtcagaatattctgagaaagttagggtgggccataatttctcagctatgctttctgtactagaaaacaggagagatttatgcataggagtgggataagtggtttaatagattgttaataaaatacatatctgtttgttgtttttgttgttggtccttagggttcaattcaaacttgaatattccacttgtctgggtggtacag

SEQ ID NO: 647 - DNA, 129 bp, Homo sapiens
cacacctgtaatcccagcactttgagaggccgaggcaggcggatcacgaggttaggagatcgagaccatcctggctaacatggtgaaaccccgtgtctactaaaaatacaaaaattagccgggtgtggt

SEQ ID NO: 648 - DNA, 770 bp, Homo sapiens
catcatcattctgagttaccaacaggaggggtagcagacagtccaaggggcaaggcagggactcccagctccaggctccagcctctcctcccctccaccctctcctggtcctgtcctgaaatctttggctcccttgaaacttgttatgcccgggcaaatgccaccctcgtgccactgtattcccaccacctccaatgagtgtcccccacctgatggggtcacacacttgtccagccacctgcacagaaaagcctcatggacacagccctgtgaggtcagaaatagaccgaacagggtcactcggttggaaggcgtggtagtgttagaacccaggtgtttgaactcggtctaatattcattccactctttcacacacacgtaagggcacatgaccactattaatcaaattttcaaaaaaaaatcagctgggcacaatggctcatgcctgtaatcccagcaatttgggaggccaaggcgggtggattacctgaggtcaggagtttgagaccagcctggccagcatggtgaaaccccgtctctactaaaaatacaaaaattagctatgcatggtggcacacgcctgtcatcccagctactcgagaggctgaggcaggggaatcacttgaacctgggaggcagaggttgccatgaactgagattgcgccactgcactccagcctgggcaacagagcgagactccatctcaaaaataaataaataaagggaatttgacataaaatcgttaatgttgactgtttcagcctgggtga

SEQ ID NO: 649 - DNA, 770 bp, Homo sapiens; identical to SEQ ID NO: 648

SEQ ID NO: 650 - DNA, 940 bp, Homo sapiens
agagtaacctcatctgggccgtttggggctggtggttccaaatttttgcctctggcctgggcccgtcatccaacgccaggcctccctggggctcccactgtgggtacctcgctaactaataatcttcatttcccatgtaaacacaggcacctgcgtatgccccatttcgggagaggtaaccagcccctagttgccctggccagaactctgggagaagctatgttcagtattagaccctgtgaattctttttattattattattattattattattatttactgttgtgttgggctctcgctctgctgcccaggctggagtgcatttgtgtgatcatagctcactgcagcctcaaattcccgggctcaagtgatcctcccgcctcaacctctcgagtagctgggactatgggcacatgccaccactccctgctaagaccctgtgaattctatttccctaacctcgctggaatcagctccctccttcccagcagttggctttctccctctctttcctggtctggtctgtctaccaccagttgccatcctgtcctgagtgatcgcttcatttcccaccctgattgacatcctcagggattccccttcagcataagctgcccccaccccgggcgtggtcccttgcacctccctccacaggctggcccctgcctgcctcctcacctcacgtatccccagtcacctcctctgctccaaggcacggcaggtccctgcccttctctgagcaggccactttgtttgaacacgtctctgtgtctttgaatagccctcctctccccactgaagccttctgcctcccaccacgaataaagatgatctttgtcttctttaaaacttgccctaagtttgcaaaacacaggatgtagagcagcatctaatagactatcatttgtgtttgaaaaaaaaaaaaatagggccgggcgc

SEQ ID NO: 651 - DNA, 940 bp, Homo sapiens
agagtaacctcatctgggccgtttggggctggtggttccaaatttttgcctctggcctgggcccgtcatccaacgccaggcctccctggggctcccactgtgggtacctcgctaactaataatcttcatttcccatgtaaacacaggcacctccgtatgccccatttcaggagaggtaaccagcccctagttgccctggccagaactctgggagaagctatgttcagtattagaccctgtgaattctttttattattattattattattattattatttactgttgtgttgggctctcgctctgctgcccaggctggagtgcatttgtgtgatcatagctcactgcagcctcaaattcccgggctcaagtgatcctcccgcctcaacctctcgagtagctgggactatgggcacatgccaccactccctgctaagaccctgtgaattctatttccctaacctcgctggaatcagctccctccttcccagcagttggctttctccctctctttcctggtctggtctgtctaccaccagttgccatcctgtcctgagtgattgcttcatttcccaccctgattgacatcctcagggattccccttcagcataagctgcccccaccccgggcgtggtcccttgcacctccctccacaggctggcccctgcctgcctcctcacctcacgtatccccagtcacctcctctgctccaaggcacggcaggtccctgcccttctctgagcaggccactttgtttgaacacgtctctgtgtctttgaatagccctcctctccccactgaagccttctgcctcccaccacgaataaagatgatctttgtcttctttaaaacttgccctaagtttgcaaaacacaggatgtagagcagcatctaatagactatcatttgtgtttgaaaaaaaaaaaaatagggccgggcgc

SEQ ID NO: 652 - DNA, 624 bp, Homo sapiens
cagatacttagcttagaagtgaacttttgggacccaactcttttgcaagttggaggcttcctgtaacgttaatttcaggaaatcctaggcaaatatgcagttactgttctagaagatacataggtagtgtgtactgtgatggaaattaaaatgtcactgttaaaaggtttgcattttgtgggcttggaagggcctaaaacttccttcttaggctttctcttcactagtgggctcttgcattatattacttccagagaaaggcaggcaggattagaggcatggcaaggagaacaatttgagaaatactatactgtgcaaaagagcaaagacaactttaatggcaatgaggataaattaacttctttgactcagtcgccaagtaagataaatccataattacttattccagtttgatttttacataagaagttcttctggttattctttaatatagatttgattttcttttccctaaattttagccttagattactggacagtttagtcatttctgtaatgtaaaagcttactattcaagtgtctgatacaaccttaccatgaggttacttttgacaaaataaaacccttttaaatattagagggtcccagtcttagttgaagtta

SEQ ID NO: 653 - DNA, 624 bp, Homo sapiens; identical to SEQ ID NO: 652

SEQ ID NO: 654 - DNA, 624 bp, Homo sapiens; identical to SEQ ID NO: 652

SEQ ID NO: 655 - DNA, 307 bp, Homo sapiens
gtttcaattttcctttgtcatttatacttgcatttgcctccttttaccctaaccaatttttttctctcatgtgcatatatgtattccctctttcccaacactgtcataattacttcaaataattattcaatcctatcactttcatttttagattttcctttttggggggaggaggattattttctttttaaaaatgttaacaaaatatttcaaacttgcagaatataaccaatatccatgatcctatctctcagaattaattttttaaagaaataaaaacatatatttggagtctcctttgtacttc

SEQ ID NO: 656 - DNA, 86 bp, Homo sapiens
gtggtggcagatgcctgtaatcccagctacttgggaggctgaggcaggagaatcacttgaacccaggaggcggaggttgcagtgag

SEQ ID NO: 657 - DNA, 86 bp, Homo sapiens; identical to SEQ ID NO: 656

SEQ ID NO: 658 - DNA, 86 bp, Homo sapiens; identical to SEQ ID NO: 656

SEQ ID NO: 659 - DNA, 307 bp, Homo sapiens; identical to SEQ ID NO: 655

SEQ ID NO: 660 - DNA, 307 bp, Homo sapiens; identical to SEQ ID NO: 655

SEQ ID NO: 661 - DNA, 146 bp, Homo sapiens
atggtgaaaccctgtctctactaaaaatacaaaaattagctgggcatggtggctcatgcctgtaatcccagctacttgggaggctgaggcgggagaatcgcttgaacccaggaggcagaggttgcagtgagccgagatcataccat

SEQ ID NO: 662 - DNA, 473 bp, Homo sapiens
gtgaaccaagattgtaccaccgcactccagcctgggtgacagagtgatactccatctcaaaaaaatagaaaaatttttaaaaattaaaaagaaaatcaggagaccttaatatagtcttgatgtgctctagctaggtggaattcctccccaggctctggagagtaaagctgctgaagaactcatgaacaggaagttgtagcatataggccattcaaaattgtctctaggctgggcgcagtggctcatgcctgtaatcccagcactttgggaggctgaggcaggtggatcacctaaggtcaggagtttgagactagtttgggcaacatggtgaaaccctatctctactaaaaatacaaaaattagctgggcatggtggcatgtgcctgtaatcccagctacttgggaggctgaggcaggaaaatcacttgaacccaggagacggaggctgcagtgagcccgagatggtgccactg

SEQ ID NO: 663 - DNA, 32221 bp, Homo sapiens
atagggaatcctttccccattgcttgtttttctcaggtttgccaaagatcagatagttggagatatgcggcattatttctgaggtctctgttctgttccattagtctatatctctgttttggtaccagtaccatgctgttttggttactgtagccttgtagtatagtttgaagtcaggtagcgtgatgcctccagctttgttcttttggcttaggattgacttggcaatgagggctcttttttggttccatatgaacttgaaagtagttttttccaattctgtgaagaaagtcattggtagcttgatggggatggcattgaatctacaaattaccttgggcagtatggccattttcacgatattgattcttcctatacatgagcatggaatgttcttccatttgtttctatcctcttttatttcattgagcagtggtttgtagttctccttgaagaggtccttcacatcccttgtaagttggattcctaggtattttattctctttgaagcaattgtgaatgggagttcactcatgatttggctctctgtttgtctgttattggtgtataagaatgcttgggatttttgtacattgattttgtatcctgagactttgctgaagttgcttatcagcttaaggagatttggggctgagacgatggggttttctagatatacaatcatgtctctgcaaacagggacaatttgacttcctcttttcctaattgaatgccctttatttccttctcctgccggatttccctggccagaacttccaaccctatgttgaataggagtggtgagagagggcatccctgtcttgtgccagttttcaaagggaatgctttcagtttttgcccattcagtataatgttggctgtgggtttgtcatagatagctcttattattttgagatatgtcccatcaatacctaatttattgagagtttttagcatgaaggttgttgaattttgtcaaaggccttttctgcatctattgagataatcatgtggtttttgtgtttggttctgtttatatgctggattacgtttattgatttgcgtatgttgaaccagccttgcatcccagggatgaagcccacttgatcgtggtggataagctttttgatgtgctgctggattcggcttcccagtattttattgaggatttttgcatcaatgttcatcaaggatattggtctaaaattctctgttttggttgtgtctctgccaggctttggtatcaggataatgctggcctcatgaaatgagttagggaggcttccctctttttctattgattggaatagtttcagaaggaatggtaccagctcctccttgtacctctggtagaattcggctgtgaatccatctggtcctggactttttttggttggtaagctattaattattgcctcaatttcagcgcctgttattggtctattcagagattcaacttcttcctggtttagtcttgggagggtgtatgtgtcgaggaatttatccatttcttctagattttctagtttatttgcgtagaggtgtttatagtattctctgatggtagtttgtatttctgtgggatcagtggtgatatcccctttatcattttttattgcctctatttgattcttctctcttttcttctttattagtcttgctagaggtctatcaattttgttggtcctttcaaaaaaccagctcctggatgcattgattttttgaagggtattttgtgtctctatttccttcagttctgctctgatcttagttatttcttgccttctgctagcttttgaatgtgtttgctcttgcttctctagttcttttaattgtgatgttagggtgtcaattttagatctttcctgctttctcttgtggacatttactgctataaacttccctctacacactgctttgaatgtgtcccagagattctggtatgttgtgtctttgttctcgctggtttcaaagaacatctttatttctgccttcatttcgttatgtacccagtagtcattcaggagcaggttgttcaatttccatgtcgttgagcagttttgagtgagtttcttaatcctgagttctagtttgattgcactgtggtctgagagacgtttgtaataatttctgttcttttacatttgctgaggagtgctttacttccaactatgtggtcagttttggaataggtatggtgtggtgctgaaaagaatgtatattctgttgatttggggtggagagttctgtagatgtctattaggtctgcttggtgcagagctgagttcaattcctggatatccttgttaactttctgtctcattgatctgtctaatgttgacagtgtggtgttaaagtctcccattattattgtgtgggagtctaagtctctttgtaggtcactcaggacttgctttatgaatctgggtgctcctgtattgggtgcatatatatttaggatggttaactcttcttgttgaattgatccctttaccattatgtaatggccttctttgtctcttttgatctttgttggtttaaagtctgttttatcagagactaggattgcaacccctgcctttttttgttttccatttgcttggtagatcttcctccatccctttattttgagcctatgtgtgtctctgcacatgagatggatctcctcaatatggcaccctgttgggtcttgactctttatccaatttgccagtctgtgtcttttaattggagcatttagcccatttacatttaaggttaatattgttatgtgtgaatttgatcctgtgattataatgttagctggttattttgcttgttagttgatgcagcttcttcctagccttgatggtctttacaatttggcatgtttttgcagtggctggtaccagttgttcctttccatgtttagtgcttcctttaggagctcttttagggcaggcctggtggtgacaaaatatctcagcatttgcttgtctgtaaagtattttatttctcctttacttatgaagcttagtttggctggatatgaaagtctgggttgaaaattcttttctttaagaatgtccaatatcgggccccaccctcttctggcttgtagagtttctgctgagagatcagctgttagtcttatcggcttccctttgtgggtaagccgacctttctctctggctgcccttaacactttttccttcatttcaactttggtgaatctgacaattgtgtgtcttggagttgctcttctcgaggagtatctttgtagcattctctgtatttcctgaatttaaatgttggcctgctttgctagattggggaagttctcctggataatatcctgcagagtgttttccaacttggttccattctccccatcactttcaggtacaccaatcagacgtagatttggtcttttcacatagtcccatatttgatggaggctttgttcgtttctttttattcttttttctctaaacttctcttctcacttcatttcattcatttcatcttccatcactgatagcctttcttccagttgattgcataggctactgaggcttgtactttcatcacatagttcttgtgctgtggttttcagctccatcaggtcctttaaggacttctctgcattggttattctagttagccattcatctaattttttttcaaggtttttaacttcaccattggttcaaacttcctcctttagctcggagtagtttgatcttctgaagccttcttctctcaactcatcaaattcattctccatccagctttgttccgttgctggtgaggagctgcattcctttggaggaggagaggcgctctgatttttagagtttccattttttctgctctgttttttccccatctttgtggttttatctacttttggtctttgatgatggtgacgtatagatggggttttggtgtggatgtcctttctgtttgttagttttccttctaacagtcaggactctcagctgcaggtctgttggagtttgctggaggtccactccagaccccgtttgcctgggtatcagcagcagtggctgcagaacagcgggtattggtgaaccacaaatgctgctgcctgatcgttcctctggaagttttgtctcagaggagtacccggccgtgtgaggtgtcagtccgcccctactggggggtgcctcccatttaggctactcgggggtcagggacccacttgaggaggtggtttgcccgttctcagatctcaagctgcatgctgggagaaccactactctcttcaaagctgtgagacagggacatttaagtctgcagaggttactgctgccttttgtttgtgccctgcccccagaggtggagcctacagaggcaggcaggcctccttgagctgtggtgggctccacccagttcgagcttcccggccgctttgtttacctactcaagcctgggcaatggcgggcgcctcccccagctgcgctgctgccttgcagtttgatctcggactgctgtgctagcaatgagcgaggctctgtgggtgtaggaccctcctagccatgtgcaggatataatctcctggtgtgccgtttgttaagcccattggaaaagcgcagtattagggtgggagtgacctgattttccaggtgccatctgtcacccctttctttgactaggaaagggaattccctgacccttgcgcttcccgggtgtggcaatgcctcgccctgcttcggctcatgcacggtgtgctgcacccactgtcctacacccactgtctggcactccccactgagatgaacctggtacctcagttggaaatgcagaaatcacccgtcttctgtgtcgctcacactgggagctgtagactggagcttttcctatttggccatcttggctccaccccagttgatccattttctaagaaagattggcatgatgtgaaagcccctgctgtgttcaatataagaaatattggaaagaccctagtcaccaggacccaaggaaccaaaactgcatctgatggcctcaagggtcacatgtttgaagtgagtcctgctgatttgcagaatagtgaagttgcatttagaaaatttaagctgatttttgaagatatttgggcaaaaactgcataacttccatgccatggatcttacccatgacaaaatgtgcttcatggtcaaaaaaatggcagacaatgattgaagctcatgtccatgtcaagactaccactgcgcggtggctcatgcctataatcccagcactttgggaggccaaggcaggtggatcacctgaggtcaggagtttgagaacagcctgatcaacatggtgaaaccccatctctactaaaaatacaaacattagccaggtgtggtggtggtcacctgtaagcccagctactcaagaggctgaggcaggagaattgcttgaacctgggaggcagaggttgcagtgagccgaaatcatgctgctgtactccagcctggttgacagagtaagactccatctcaaaaaaaaactaccaatggttacttgctttgtctgttctgcattgattttactaaaaaaaaaaacaataccacaacaatcagatatagaagacctgttatgctcagcattaacaggtctaccaaatccggaagaagatttggaaatcatgacctgataagtgcagagaaatgacttgaaagaagtggtcaataaattgattccagacagcattgaaaagacacagaaaaggcttgccaatctatttatcctctccatgatgtcttcgttagaagactaaaaatgctgaagaagcccaagtttgaattgggaaaactcatggagcttcatggtgaatgcagtagttctggaaaagccactggggacgagacaggtgctaaagttgaaccagctgatggatatgaaccaccagttccaagaatctatttatagttcagacttataatagtggcacataaaaagtcctatttgttaaaaaaaaaaaaaaaaaagacttgttgaagccatgagttaactgtcctttgcagttctgtcacccttataatcggttcctgggactgattttaaccacattctaccctacaatggctagaggcctctggctttcacatcatacctcagttgacacttagctaacctgaatcatttgtttgtcaagacttccaaagagttaacaaaatctgaccagttcccaaatctttgtaattttattggctcaactccattcaagtgtcaaagttgtcacataacccagtgtgtcaccttctacctgtacctgtgcaggtgacagtcttggtgattgtgatgttactgcctgcccaggttatcaccactgtactccaaaatcccatcctgagagtctgagttttaaaaccactgttaccaactctcatggcttggttctcttacaggcagaatctgagacaaaggtcatatcaggtcgtttacttgggagtgatacccaagagcaggagtgaggaaccaggggaataagaccagggaagatggaaaccagtagaagggaacaatgcataagaatgttggcctcgtcccactcccagtgagactgagtattatacatgatctgtttttgatattttaataagtatgtttttcctaggtaattttgaattttaatttttaatgatttacaatatttttctcatgttttaaaatttttattccatttgtgggttttttttttcctgtccttttctcatttattaagatccagggttggtttttcaaaaaatgtatcttgggctggcatagtagctcatgcctgtaatcccagctctctgggaggacaaggcaggaggatcacttgagcccaggagttcaagaccagcctgggccaacatggcaaaccccatctccatgaaaaataaaaaaagtagctgggcatagtggcatgcatctgtggtcccacctattcaagaggctaaagtgggaggattcctcgaacctgggaagtcaaggctgcagtgagcagtgaccacaccacctcactccagcctgggcgacagggtgagatcctgtctcaaaaaaaaaaaaaaaaaaaaagaatatatctttaaaaagccattttcatagtcactttcatatgttactgataggtcaaacactgataaaacatttctgtaaagccttttgcaatttgtatcaataacttaaatttttcacctactataatttctcgaagacaagctgaacttgggtcacagaaacagggtaggtttctgggtgcctggcttaggagtctcagtaatgcagggttgatttttcatggatgtttctccccaatttgttgcttatatttgttgttgtcagtgatgttttggggcattagaaattttaaagtttcatctggttgaaactgttaactttagaaagtaattcccctgccagaaatcagaaaattttcacccacgttttcttctagttttcttctggagatttgagatttttaaaacatttaactcctaacgcaactatagaagcagctgacataaaaaatgtaagaaaataataccaagtgctggagaggatgtggagaaatgatctttcatacattgtttgggagaatgtaaaatgatataatcattctggaaaatagtttggtagtttcttcccgaagtgagcattacgatattacccagcaattgcattcttggaatttttgtcctagagaaataaaaacattcacatgaaaggctgtgtgtgagttttcataacagatttattcataatagcaaaatactggaaacagcccaaatgtcattcaattggtgaatggctgaacaaactcaggtataagcataaaatagaatattcatcggcaataaaaaggaatcacctattgatgcgtataacaatttagatggacttcaagggtattatttttagtgaaaggagacagtctcaaaaggttacatgttgtgtgatctcaattacataacgtttttgaaatgacaaaactttaatatggagaatagttagtggctgtcaggggacaggaatgtatgtgtgttggaggttgggagtagcaaggagtgggaagcaggggtagaagtgaatgcaaatacaaagaggtagcatgatggagtctttttgtggtgatgcaacagttcttaagcttgtttgtggtagtggttacaccgatctgttaatgggataaagttgcatggaacaaaacttatgtctatacaaaaacctgcacataaatgtttacagcagcttttttcataaaacttgggggtagccaagatgtccttcagcaagtgaatggataaataaactgtggtacaaccagacaatggactatcattcagtactaaaaagaaacgagctatcaagctatgaaaagacatggaggaaacaaatacctatcactaagtgaaggaagctaatctgaaaaggctgcaaactgtatgattccaactatatgacattctattgtagaaaaggcaaaactagggagactgtaaaaagatcagtggttgccagggattagggatcaggagaaacaatgaataggtagaacacagaaaatttttaggacagtgaaactgctctgcatgatggcataatggggaatccgtgtcactacacgtttgtccaaacccacactacaaattttgggtaataatgatgtgtcaaggttggttaaccagttgtgacagatgtgctactctagtaaggaatgttgcctgtgtcggggcaggaggtatatgggaaatctctgtatctttcactcaattttgctctgaacctaaaactgctctgaaaaaaaaaataaagttcctttaaacaaatgaatagataaataagtaataagtgaagtttacttataaaattgcataggactacacatatacacatacgcaaatcatgatttttaaaacagtgaaaaaaagcaaaatgtgtacttttcttttttttttttttttgagacggagtctcgctctgtcacctaggctggagtgcaatggtgcgaccttggcttgctacaacctccacctcctgggttcaagcgattctcgtgcctcagcctcctgagtagctgggattacaggagcccgccaccatgcctagctaatttttgcatttttagtagagacagggtttcatcatgttgcccagactggtcttgaactcctgacctcaagtgatctgcccatctcggcctcccaaagtgctgggattacaggcatgagccaccgcactggccacagtgtgtactcgaattaatgataatgatccatttcctggttttgatatttgatatggcagctacagaagatgttatctttaagggaagatgggcaaagagtacacagaactccgtactatcttttcaacttcctgtgagtttatattacttaaaaataaaaaaaatttaaacacttaattctttacttaatctgaaatttatgctgtatatggtatgaggtgagaatactaaattgatttatattcacatggttaaccaaagatcccagtgttatatcttaattaatacttacctgccccactaatttgtagaacctgctatgagattcattaaacactttaaaattctgggatctgtttctaattcacctaactttattgttctgtgttttcttgaacgcgtgcaaggattacactgatttgattatatataacacatatatcacatatatattatatataacacatctatcacatatataacatatatatgttatatatataatatataacatataatgtataataatatcatatataatatatattttatatatatttatcacatataatatatattttatatatatttatcacatataatatatattttgtatatatttatcacatataatatatattttgtatatatttatcacatataatatatattttgtatatatttatcacatataatatatattttgtatatatttatcacatatatattttatatatatatatatatttatttatttttttttttttttagacaagagtcttgctctgttgcccaggctggagtgcagtggtactctcggctcactgcaacctctgcctcctgtgttcaaatgattctcttgtcttagcctcccggttagctgggactacaggcacgtaacaccacgctggctaatttttgtatttttttggtagagacaggtttcaccatgttggccaggttggtctcaaactcctggcctcaagtgatccacttgccttggcctcccaaagtgctgggattacaggtgtgagccaccacacttggctcccagtcatgatttgattatatttactttataatttataatttaattatatttactttcagtagcgaacaacaccagtgattccttaataaagaggtggaaaagaaagaaaaccaatattttctgagcaagactaagatcttcacatggattatgtcacttaatcctcccaatactcatatgtagtaggtcatattattattcccattttacagatgagaaataagaggctcagagaaattaaataatcattcaggatatcaagctactaagtggcagagctggaatcaaacccaggcctagaattctgaacattcttcgctctgttgcccaggctggcctgaggccatccttctgccttggcctcccaaagtgctgggcttacaggtgtgggccaccaagcctgtaataaaatttatttaaccaccactccattcacacagttaggtgttcaatctctcctattaataaatagtgggataaagaacacccttatacatagtttatttcacatgtgtgcaagagtatctgtacattacattcctaacagtgaaatttctggacctaagtgatggtgcaattataatttggataggtgttttccaaactgccttccagaaagttggatatattcacacttctactaacaataacacagtacctgtctctggagcccctatctgatttttcatctgtgccagtttaacaagagaagatagtacttaattatattttattatattattatgatagttttaatttgtatttcttatattttgtataagggtgatcatgggttattggtctttttcttaatgatttgtaggagctctttatacattaaaggattttctcctttatttctattttgaactgcacattttttcccagtgccttttcttctgattctgcttatgcagaggggttgccatgcagaaattttttcttttcatgttcataaaagacaagtttgtcagtcttgtcttttatagtttctgagtcttatatctctatactactagattacaaaaaataaaagtgtcctttgtttcttctagtaattgtatggttcttttacagtttcaactatctagaatttattttgtttggatggttacccagttgtctcaatataatttttaaaatgataatttttccctactgatttgaaagccagctgactctatactgaattttctgttttatattcagaaatggcatttctgaggcaggaggatcacatcaagccatcctgggcaacagagtgaaaaatgtttaggctgtttcattgtgcttgatgactatttgtattaatatataaataccacacagtttttcttattatattttgataatatgttttattatctggtaaggcttatgccctgatcacttttctttttcaaaatggcaagtttgtttatttttaatttcaccgtggtgctgggcccatgcctaagggggagacctggctctccaacctcgcttatgtgttcttccccagccccagtccttagggtcaggttctctatgccattgttctctgcacattcagaagatggtttagtagaaatgtgagcccctggcccagcacagtggcttactcctgcaatcccagcactttggaaggctgaggcaggaggatctcttgtgtccaggagttcaagaccagcctgggcaacatagtgagacctcatctctacaaaaaataaacaaaattagctgcacatggtgatgtgcacctgtagtcccaattacttgggaggctgaggcaggaggattgcttgaacccaggccatcaaggctgcagtgagctgagatcataccactgcactctagcatgggcgacagtgcaagaccctgtctcaaaaaaaaaaaaaaagaaaaagaaaaaaaaaggaaatctgagccccctttatccatttcccctcattggaggcttccttaaaggcctttaccaatagtgtttctaagtcctagggggatctacgctcccctggacaaggcacagggcttcttaaagtacgtctcttgttcaggttctcagaataagttctgaggtttgatgtttttctccaactaatgtcaaatagcaggcctgtaattttcccaaatttaagagtattttcccctggcttcctggctggctcagacttgtgaaaatattctcaatttcaacttcacttcctttaacattgtgcaagacagtatgtggcaaaaccctagaatataaaacgtttctgacattttcactcagtaacttgccaatttctcatttgattcttttttctttttataaagacaaattagaaagcaatcactccataacctttggctttgttatttctttatcctttgtgctacccagtcctatttccctatctatcactcttctgtattgattttggatggtttggtgtttgcctttgtgctttgcaaagaaagccattgattttgaatagatctagaaatgttgggagctcttggcgatgtacccaatcttagtgttgttactaaaggtattagacattgccttgcaagtgagtttattgtctcagtctatgattatggaaataaagactgctaacagctattggcaaagaccttcagagttatcatctgcctattcatgacaataagagctaggagattgacctgctaaatgccctactgaaccgctgatgacaagtatgtctttaatttcaactctaaaaaataggatatggtgtaacagaaagagaactttggatagaaaatcaggatacctggctgggtacggtggctcacgcctgtaatcccagtattttgggaggctgaggtgggcagatcacttgaggtcagaagtttgagaccagcctggtcaacatggggaaaccccgtctccactaaaaatgcgaaaattagatgggtgtggtggtgagtgcctgtaatcccagctactcgggaggctgaggcaggagaattgcttgaaccagggaggtggaggttgcagtgaaccaagattgtaccaccgcactccagcctgggtgacagagtgatactccatctcaaaaaaatagaaaaatttttaaaaattaaaaagaaaatcaggagaccttaatatagtcttgatgtgctctagctaggtggaattcctccccaggctctggagagtaaagctgctgaagaactcatgaacaggaagttgtagcatataggccattcaaaattgtctctaggctgggcgcagtggctcatgcctgtaatcccagcactttgggaggctgaggcaggtggatcacctaaggtcaggagtttgagactagtttgggcaacatggtgaaaccctatctctactaaaaatacaaaaattagctgggcatggtggcatgtgcctgtaatcccagctacttgggaggctgaggcaggaaaatcacttgaacccaggagacggaggctgcagtgagccgagatggtgccactgcactccagcctgggtgacagagtgagactccatctcaaaaaaataaagattgtctctaaatgataagggccagagataatgtgggtagctagggctatcttatccttttatctttcttgatcacatatcatccatcggattttcacccagtctctggagtcaatcatatgacaaattaggtggccaaagggcaaacagtagaaaaaaatgaaggaaaaaaaatgtaagtcatccccaggctagaggaccatatgttgaacagttgagaggtgcctataaatgtgtgggaaggctgatggggaggggtcaggtctgccagcttcccagccccagagacggtgccatgggatgggcataaggaagcctttgcccaggacatgtctaaggtatccgctgtggcccacttgaagcctgccaggcgtacctgcccggctgtgtcttcccttacttaaggccactcttgtcggtggccctgcctctggtggagtaaggaggtgctctgccatataaagcacttttgatttcatgggctgactatgatggtgctccaagggagtataccaaaatcagagatgttcctgctctttgactcagcaattccgaggtaaaacttgagagagggttaatttgaaaaattgggttttcatttgcttgggctatggagcaaaatgagatataccttccatgtccccctgaaaccatccataaattctgcgattctcacaggaagggataattttagtgaaactgaggaaggagctcacctatgtggtaaggggtaaataaataggaggctgaacagtgagagctgtgatgacactcaggcttgcaagctgattcacctaccagtcgagcaagactgccccaggcaaaccttccaaagcagaaggagaaaaatgtctcatgaacactcacccatgtgacctgaggctgagtcatccgtggttaattccgattcatttatgccttttatctttctggatattcagggaaacaagggtcttttgtccagctagaagccagacatcttttttgaaaccatcttgttcttgagttgcatctaatgggccatcctcacattggtgagtcactgtgtctcaggccagccttccaccctcatccagctcttcctcaaccagagtggccccaactctttcctcactgattgcgtgccttctgggtactgtttgtgtgctgggtgtgggtgtggcagggagcaggcggtctctctcctgtgggtgagcacatttccaggctgatgaggagagaccctgcccacatcacaccctaatgtaccttaccccactctccttatctgtaagatgactcacatgtactctcggtggagtatttggaatcctggaatcttataacattcaatgcaacttgttaccttccacaattgttacctcacccaatctttgattgaaagaataaagcaaatgtaatatcctgggtatcatctcagttcaggggaaaaaccagtcttctttaatctgataaaggagactacctaaatcctaccgagaatggataagtaatacatgattttatatatatatatatatatatatatatatatatatatatatatatatatataatttatttatttattttttgagtcgcagtctcactctgtcgcccaggctagagtgcagtggcacaatctcagctcactgcaagctctgcctcccgggttcaagcaattctcctgcctcagcctctcaagtagctggaactacaagtgcccaccaccatgaccagctaatgttttatatttttagtagagatggggtttcactgtgttatccaggatggtctcgatctcctgacctcgtgatccacccacctcagcctcccaaagtgctgggattacaggtgtgagccaccacacccggccatgatggaatatattaaccaatagtgaaaataaaggaattacagctacatgaagtaaaatgaataaatcttagaaacaatgctgagtgaaaaaaactcaagtcctggaatctctctggataagaacatagcaattgtataaagataaaatctagctacgtgaatattatagatattttggtaatttgtagaaaacactgtgtgtgtgtgtgtgtgtgtgtgtgtattagtttcctgtcactgctgtaacaaattaccacaaacttggtggtttaaagcaacagattattatattatgctctcacagttctgtaggccagaagtctgaaatccatttcactgggctaaaaatcaaggccttggcagcactgtgcttcctccagaggccctggggaagaatgtgttccttgcctcttccagtttcttgtggctgccagcattccttggccatatccctccagtgtctgctttgtggtcacatggccttctcttctgtagtcgatcctccctctgcctcaattcattaggacacttgtgattgtatttagggcccaactggataatccaggatcatctccccagctcaagagccttaactgaatcatatctgccaagtctttgccattcactgtaacatttccaggttccagggattagaatgtaggcatctcaggttcattgttcagcctatcactgtgtgtgtgtgtgtgtgtgtgtgtgtgtgtgtgtgtgtgtgtgtgcatgcgcatttttttcttggaatgataaataccaagtttagcaacagtggtgctggaacagatttgtacaggcttgccacaaccaactacacacatctcttccagctccgcactcagttactttaggttggtagcttgacatcagtcacatgggattatttacaccatggaagttgacaagaactgcaaatcagtgttttttcccagagaactggtttacactgtcagtagcgtggttaccttcttagtgggaaaggcagaggggtggaattaggtttggtaatgctttagtttttaaattggatggtgtgttaacaggtgtttgttttactattatgctttaaatgtacataggtttttttgtgggttttttttttttttgagatggagtcttgctttgtgacccaggctggattgcagtggctcaatctccgctcactgcaacctctgcctcccaggttcaagcaattctcctccctcagcctcccaagtagctgggattacaggccttcaccaccatgcctggctaattttttttttaagtagagatggggtttcaccatgttgaccaggctggtcttgaactcctgaactcaagtaatccacctgcctcagcctcccaaagggctgggattacaggagtgagccaccatgcccagcctgtacataaggttttatatacagacataatactgatttttttaagagaaaaaatggaaggcagcaggaagtttctgatctttcaaaaaagaaataaaacaataccaaaggctggtgagaatgtggagacagtggacctttcatatattgctggtggggatgtaaatgacacagatactctgaaaaatagaaaggcagttttcttttcattttgtttctcttttttttgagatggagtcttgctctgtcgcccaggctggagtgcggtggcataatctcggctcactgcagcctctgcctcctgggttcaagcccttctcctgccttggctcccaggtagctgggactacaggcgcacgccaccacacctggctaatttttctatttttagtagagacgggttttccccatgatggccaggctggtcttgaactcctgacctaaagtgatctgcctgcctcggcctcccaaagtgctgaacccccaagcatgagccaccacgcccagccaggatggcagttttctacatagctaaacatattcttactatcccagcattgcactcctggaaatttatgccaaataaattaaaacttatatgcatacaaaaccttgacataatgttcactgcaggtttacttgtagtagccccaaactggaaacaaccaaaatgtcttttaataggagaatggttaaacaagctattgtgcttaattattgatacatgcaaaaacttggatggacctcaaaggcattatgctgagtgaaaaaaagccaatcatgaaaggtcacatattgtatggatttatttatattgcattctcaaaatgataaaattatgagtcaccatgccttatctgaagcaagcttccccattataatctgatcatcagtatggggagcaaatacagtgtttcttccttaccctgacctgctggactttcctcgtctgcccctgcttttaaatctctgtccaaagctgccttgatgctctttatcatggacactgagcacagagcagcagtttaataagatttcctgacaaaagcagcccactgaattggatgttttctctctctttcttttattattgtatttgaatttccccctagccagatggctgataacaattctgtttctcttcttttccaataagtaaattccagactcaagaatatcccctcaacaggccagaaaattccatctttgataagccagggggtagagttaatggaggaagaacttgctgatcagggactctcagtgtgttagtctgttttcatgctgctaataaagacatacccgaaactggttaatttatatgggaaaaatgtttaatggactcacatttccacgtggctggggaggcctcacaatcatggtggaaagcaaggaggagcaagtcatttcttacatggatggcagcaggcaaagagagagcttgtgcagggaaactcctgtttttaaaaccatcagatctcatcagacttattcactaacatgagaacagcatgggaaagactcgcccctgtgattaaattatctcccactaggtccttcccacaacacgtgggaattatgggagctacaagatgggatttgggtggggacacagagccaaaccatatcactcagtttataacatacagaatcacagcctctgagcagaggagaccttgcagccccatgcactacactggggctggtgcctgggactagggcaatttcaggctatggcgcctccccccaccattcttccctctgtatttctgcagattcctgctgggaaccaatgcctattaatgaggtttctacttctagcctatgagttaacattctttttgtaaattaattttttaatattttatctaaacaaatataaaccaaattgtatttaaaggctcatgaaggaggactgcattcctctacttcacactttagtctcatgcctcagaggcagaactttgaacttcagctatttcttctgatatttgccatatttacactgccattacagacacatcaattttagatgttatctcttgactttctaacaaatggcagaatggggatttagctctctttctctaacatccccacttgccttgtctcaatatagtgtcacaactttttaattcaattgatatttggctaggtgcggtggctcatgcctgtaatcccaggactttggaaggctgaggcttggggccaggagtttgagactagcctggccaacatggtgaaaccccatccctactaaacttacaaaaattagccaggcatggtggcacactcctgtggttccagctactcaggaggctgaggcacgacaattgcttgaaaccaggaggtggaggttgcactgagctgagatcatgccactgcactgcagcctgggtgacagagtgagactctgtctcaaaaattttaaaaataaaaataaataaattgatatttagtttttacattttatgttcccaggcaagttaagtagtataatttcctccattttataattttttgcctatctgcagttattatttgcatttctttttttcttacttttactcttgtacatatgtgtcccttagtctttctagatcctctcacaaaattataaaattcctcttaaaacaattttctacatggtagaatctatcagattatctaatcagattttttaacctagaggttaccttttcagagcccagagctcttctagcctaagcaggtcgttaacacagagttaagagtgcaaaagatttatggaagagcaattgctctgaaaggaaaagggaattaaggattggacaggggagctgctgccctgagttgcaaacctgacaaagattccacccgtccaatggggagcgccagtgcaaacactgcctttttagacgcccacgttatttcttcaacatcttgcttagtcattgactaagggctaccccaagaaaaatgtgaccttggctcaaaagttgaggcagatcccaaaggaactactagctataggttgtcagctaatcacaccctttttggttgggcagcaagagcaacaagtcattttctgaaggggatctgagcagtgctttttgttttgttttgttttgtttatgcggagttttgctcttatcgccaaggctggagtgcaatggtgcgatcttggttcactgcaacctctgcctcccagattcaagctattctcctgcctcaacctcccaagtagttgggattacaggcatgcaccaccacacccagctaattttcgtatttttagtagagatgggatttcgccatgatagttaggctggtctcgaactcctggcctcaggtgatccacccacctcagctttccaaagtgttgggattacaggcataagccaccatgcccggccttgagcagtgcctttctaggtctgcacagatcccattttctgaatcccacgtgttcctctttcttgttttataccctcattttggtgtagcacatttttagtagttgctgaaatgtaaagtttttgagacctaggatgtcttaaaatgtcattttaccctcatacttgacagtttgtttgggcatagaattctatatctctttgacttataattttggtagctctattgtcttttaagttctgatgttgctgttgataaatccgatagtattctgtttcctactctttaaattttcacttttttcccgcactattttgctttctctggaaatttttaggatctactctttattttcagtgtaatttccatcataatttaaaataatgtgacttggtgaaccttgttcattcattaggttgggcatacagttctcatgttcaatctggagaatgatttcattaaatactgagaaatatcttttattatatatttaataatttcctttatttttttctggtctctctttcttgactcctattagtcagatatagaactttctagattgactctaacttttttgatattttctctcctattgcctattttttgtctttttcatcaactctctgggagatattttatcttccaatctttctgttgaatttttatttcagctatcaagggcactttttcaatactcaaattgttttttcataacaccctattcttgtttcatgttttctcccattttttggaggatattagaattcttttaatattctgctctctgtaatatctctatttcctctagatcctttttttcttttcttgtgtgttttgttttgtcttttatcttggaggaatctgctgaccttaattgtctgatcaaatttaatagtgacatattatggagctcattgatagttgtttaatggcagtccctgctctagagagatcaagtggtaagctgttctttaattgcaggtcctaaaatgtcagggtttgtagaccttttctttggaatcttcacatttctttcaaagaaaaagactccagtcttccacctgtgtgctactttactggctgccatttgttttccagtagagaaagagactgagggactcttagtttactactcaaacttttactccatcttcctattttcagtggaacatctcccttccacccttccctaagatctaagatgtgctgatgtcccagaatagagagcctcttatgtccacttttctcagagaataagtgtgtaatttccagactacgggggtgggagtgttggtgggggtggaaggagtagttccctgctgggtgggggaggggaaaacatggcattataaattctctttccataactttcaaccagtcctctgtttttatttccataattaacctacattttccaaaatacctaacactcttaattcctgagatatcctagttttctgtagtgtgaactggcttgcttctcattgatgcctctctttgaaagttcttagatttcagctttctcagctctgttctaccagtcactactcctatatccacttttttgaaatattttattttactttatattttgtacagacagaggtctcactatgttgcccagactggtcttgaattcctggcttcaagtaatcttcccactttaccctcccaaagtgctgaaattacaggcatgagccactgtgccagcttcagaacttttataattctaagtggctgttgcctcctcttctttggactataataacatacatatatatacatttttcatatgtcttgactggtggtcttttggacagaagagatataaatgcatgtactatttttatttttttgagacagaatcttgctttgtcacccaggctggagtgtagtgatgagatcttggctcacagcaacctctgcctcctgagttcaagctattctcatgtctcagcctcctgagtagcagggattacagatgtgtgccaccacgcccagctaatttttgtatttttagtagagggtttcaccatgttcaccagccaggctggtctcaaactcctgacctcaggtgatccacctgcctcagcttcccaaagtgctgggattacagatatgagccaccacacctggcctaatgtactatttttaatttaaaatatctgacacaaattttcagtaggcttacaggaagtccatactgttttccttttacctttattccaatttttgcaaacattggggcatctgtatgatgcatttaggaaaacttacagttccagcatcccaagactcacagataatactgtttccttaaatgttctagaggtaacagcattgtttatgcagtgggcatgtccatcaaaacttctgtatggttattttccttgctattctggtatgtattttgccataactttgttttgggattcacattccaagctttgttattaaagatggaataggagtgaacattgtgtaatgtcttaacttcccagtagaaatcatgaggcctcagatttttaaactcaaaggttaaaggctggccgcacagagagagtaaatgttttcagtaaaagcaaaagaacaatttttttataagcacaaaaatatgttccctaccttctctaagagccataaaattgctcaaatgtttccctatccaaccactcaagtgatgcttagacctctccctgctgctcactcatcccttcctaagggtgagtggagactgtgcttgcacacctgtggtgatgggaaactgacttccactttaggcaaccccttcacctttctcagccttgactgttcttatttttataatctaccccatatggagctctgattatgtgcccagcactctgctaagagctttacaaataattcatttaatccctgccacagccctgcaaatgttgttatttccattttgcaaatgaggaaatgcagagagcttaactgcttgcccaagttcccacagtgagtgagtgagggcagggccagcaggtaagcagcagctggtctggctgtaattccttgttctttctatttgttcttccttttgtcaagcccaaaataccccctctccatagcttctacccactcaggagcatggggcaaaagccaaacctctgtccctcaggagagcacggggaaaggccaattctgtcttccacatgagcactcttcagctatttcgagatatttatctgacgttcattctactcctggctaaagttttcctgaaaaaagaaattttaaaaaagatcaatacctgttttgagaatattaagtgtacttctcccttcagtttctaagcttttttcctacttgaggcactggttcagcctcataaaggggcataggctgggtgggtgtcttcagtgtgtgcttggaagctgctgctcagaaaacagctgagactctgccttacacccaccttgtgaagggccacagtggatctgtacaagccaggagcttctttagtcttgtcctggcacacccagcacatcagccactttgaatggagctcctgcaggaggagactcagctgagtcccagagcaatagtaattgcttcataacagggatcataaagagactttgttgtgtgtccttaaagcagcttcaaattacagattcagattgggcaaatacccctataaatcccaccggatagcctggttccttggttataagcaggtttgtttttctgtactgttacccaaattcccctgattgtaatccctcataagcctatttaaactgcagaatcctggactccacagaggagttctggacctcctaagtccgaatcttcaagagagggacctgcagtttgaataagcctctcccaagggttctcatcatcccttagtgtattagtccggtttcacactgctataaagatactacctgagactgggtaatttataaacaaaggaagtgtaattgactcacaattccgcatggctggggaggcctcaggaaatttacaatcacagtggaaggggaaacagacccttttttacaagatggcaggagagagggagagtgaatgtgcaggggaaactgccatttataaaaccatcacatcttgtgaaaactcactcaactatcacaagaacagcatgggggaaactgtccccatgatccaatcacctcccaccaggttccttcctcaacacctggggattacaattaaaatgagatttgggtggggacacagagccaaaccatatcacctaagcttggaaagcattgttttgaggagttctttgcgtgaaattccattccttgtcctttattttttattttttgagaatctcgctctgttgcccaggcttgagtgcagtggtgagatttcgactcactgcaacctccacctcccaggctcagatgattctcctgcctcagcctcctgagtagctgggattacaggcatgcaccaccacacccagctaatttttgtatttttatccattcatcagttagtagacatttgggttattccagtctggagctatcatgaataaagctactatgaatattccaactcaggtcttgctgcagacatgtgttttcatttctcttgaggaaatacccaggaatgggattgctgtgtcatatgctatgtgtatgcttacctttatcaaggtgtatgcttactctttgtcaatcaagagattgatcagctgtttttcaaagtggcagtatcattttgcaattgcaccagcaatatactactgaatttttttgaaaaagacaattatttgtagagagatctacaaatacctttattttgcatcatcagcacagatgtagaattagttttgttaaagcacttcttttttttttttttttttttttgaaatggagttttgctcttgttgtccaagctggagtgcaatggcacgatctccactcaccgcaacctccgcctcccgggttcaagcgattctcctgcctcagcctctccagtagctgggattacgggcatgtgccaccatgcccagctaattttgtatttttagtagagacagggtttctccatgttggtcaggctgatctcaaactcccgacctcaggtgattcactcgtcttggcctcccaaagttctgggattacaggcgtgagccactgcgcctggccttaaagcacttcttaagagttctgggcttggagtcagattgagctgggtctgttacaaaattcaacaatactgtgtccatgattttggacaagtggctagatctctccaaatgtatttcccttatttgtaagacagagataataattcctctctgcttagagaagtcgtaaggattaaaggagatgaaacacataaagcacttaatacattacctgatatataataatcatgattaacatgttactcttattattttcattaacttctttataatagtatttgttgcagtagggtttaaacatatgagaacatgtactatgaacttcacttctttagggtttcttttgggtaataatttagaactcaagaaaaccacaggaagctgaaaaaggacgttttgtcattgaaaaaagatatttgtagttatttagaatgaacaaccagcaagtcattttacattctttctagaatttctaacttcagtttcctaatttgtaaaatgggggtcagggtggcggtggaggtagccattcttaccctgcctttctcacagtgttgatgtaaaggtcaaaggaaaaactgaacattataaattgtcaagtattatataaatatttaccaccagtgaaagttttagaggaatttttttttttttttttttttgagatggagtctcactctgtgacccaagctggagtgtagtgacacgatctcggctcactgcaatctccacagccctggttcaagtgattctcctgcctcagcctcctgagttgctgggattacaggcacctgccactgcgcctggctaatttttgtagttttagtagagacggggtttcaccattgtggccaggctggtcttgaactactgacctcatgaaccacctgcctcagcctccaaaagtgctgggattacaggcatgagccactgcacctggccaaggataaattttgtaagatatgatttaattagaaaatagaaattataagataataatgtcctttagtaatttcctttttcttttttttattattatactttaagttctagggtacatgtgcacaacatgcaggtttgttacatatgtatatgtgtgccatgttggtgtcctgcacccattaactcatcatttacattaggtatatctcttaatgctatccctccccaaccccaccccacaacaggccacggtgtgtgatgttccccttcctgtgtccatgtgttctcattgttcaattaccacctatgagtgagaacatgcggtgtttggttttttgtccttgtgatagtttgctgaaaatgatggtttccagcttcatccatgtccctacaaaggacatgaactcatccttttttatggctgcatagtattccatgctgtatatgtgccacattttcttaatccagtctatcgttgatggacatttgggttgcctccatgtctttgctattgtgaatagtgctgcagtaaacatacgtgtgcatgtgtctttatagcagcatgatttataatcatttgggtagatacccagtaatgggatggctgggtcaaatggtatttctagttctagatccttgaggaatcaccacactgtcttccacaatggttgaagtagtttacagtaaaagtgttcctatttctacacatcctctccagcacctgttgtttcctgactttttaacgatcgccattctaactggtatgacatggtatctcattgtggttttgatttgcatttctctgatggccagtgatgataagcattctttcatgtgtcttttggctgcataaatgtcttcttttgagaagtgtctgttcacatcctttgcccactttttgatggggttgtttgtgtttttcttgtaaagttgtttgagttctttgtagattctggatattagccctttgtcagatgagtagattgcaaaaattttctcccattctgtaggttgcctgttcactctgatggtagtttcttttgctgtgcagaagctctttagtttaattagatcccatttatcaattttggcttttgttgccattgcttttagtgttttagacatgaagtccttgcccatgcctatgtcctaaatggtattgcctaggttttcttccaaggattttatggttttaggtcgaacattcaagtctttaatccatcttgaattaatttttgtataaggtgtaaggaagggatccagtttcagctttctacatatggctagccagttttcccagcatgatttattaaatagggaatcctttccccatgtcttgtttttgtcaggtttgtcaaagatcagatggttgtagatgtatggtattatttctgagggctctgttctgttccattggtctagatctctgttttggtaccagtaccatgctgttttggttactgtagccttgtagtatagtttgaagtcaggtagtgtgatgcctccagctttgttcttttggcttaggattgacttggcaatgtgggctcttttttggttccatatgaacttgaaagtagttttttccaattctgtgaagaaagtcattggtagcttgatggggatggcattgaatctataaattaccttgggcaatatggcgattttcatgatattgattcttcctatccatgagcatggaatgttcttccatttgtttgtgtcctcttttattttgttgagcagtggtttgtagttcttgaagaggtccttcacatcccttgtaagttggattcctaggtattttattctctttgaagcaattgtgaatgggagttcactcatgatttggctctctgtctgttattggtgtttaagaatgcttgtgatttttgcacattgattttgtatcctgagactttgctgaagttgcttatcagcttaaggagattttgggctgatacaatggggttttctaaatatacaatcatgtcatgtgcaaacagggacaatttgacttcctcttttcctaattgaatgccctttatttctttctcctgcctgattgccctggccagaacttccaacactatgttgaataggagtggtgagagaggacatccttgtcttgtgccagttttcaaagggaatgcttccagtttttgcccattcagtatgatattagctgtgggtttgtcatagatagctcttactattttcagatacgtcccatgaatacctaattaattgagagtttttagcatgaaggggtgttgaattttgtcaaaggccttttctgcatcttttgagataaccacgtggtttttgtgtttggttctgtttatatgctggattacatttattgatttgcatatgttgaaccagccttgcatcccagggatgaagcccacttgaccatggtggataagcttcttgatgtgctgctgaattcagtttgccagtattttattgaggattttgcatcaatgttcatcaggaatattggcctaaaattctcttttttggttgtgtctctgccaggctttggtatcaggatgatgctggcctcataaaatgagttagggaggattccctctttttctattgattggaatagtttcagaaggaatggtaccagctcctctttgtacctctggtagagttcggctgtgaatccgtctggtcctggactttttttggttggtaagctattaattattgccttaatttcagagcctgttattggtctattcagagattcaacttcttcctggtttagtcttgggagggtgtatgtgtcgaggaatttatccatttcttctagattttctagtttatttgtgtagaggtgtttatagtattctctgatggtagtttgtatctctgtgggattggtggtgatatcccctttatcattttttattgcatctatttgattcttctctcttttcttctttattagtcttgctagcggtttatcaattttgttgatcttttcaaaaaaccagctcctggattcattgatttttgaagggtttttgtgtctccatctccttcagttctgctctgatcttagttatttcttgccttctgctagcttttgaatgtgtttgctcttgcttctctcgttcttttaattgtgatgttagggtgtcaattttagatctttcctgctttctcttgtgggcatttagtgctataaatttccctctacacactgctttgaatgtgtcccagagattctggtatgttgtgtctttgttctcgttggtttcaaagaacatctttatttctgccttcatttcgttatgtacccaatagtcattcaggagcaggttgttcagtttccatgtagttgagcggttttgagtgtgtttcttaatcctgagttctagtttgattgcactgtggtctgagagacagtttgttataatttctgttcttttacatttgctgaggagtgctttacttccaactatgtggtcatttttggaataagtgtgatgtagtgctgagaagaatgtatattctgttgatttggggtggagagttctgtagatgtctattagatctgctgggtgcagagctgagttcaattcctggatatccttgttaactttctgtctcatcgatctgtctaatgctgacagtgtggtgttaaagtctcccattattattgtgtgggagtctaagtctctttgtaggtcactaaggacttgctttatgaatctgggtgctcctgtattgggtgcatatatatttaggatagttagctcttcttgttgaattgatccctttaccattatgtaatggccttctttgtctcttttgatctttgttggtttaaagtctgttttatccgagacaaggattgcaacccctgctttttttgttttccgtttggttggtagatcttcctccatccctttattttgagcctatgtgtgtctctgcacatgagatggatctcctcaatatggcaccctgttgggtcttgactctttatccaatttgccagtctgtgtcttttaattggagcatttagcccatttacatttaaggttaatattgttatgtgtgaatttgatcctgtcattatgatgttagctggttattttgctcgttggttgacgcagtttcttcctagcctcaatggtcttcacaatttggcatgcttttgcagtggctggtaccggttgtttctttccatgtttagtgcttccttcaggagctcttttagggcaggcctggtggtgaaaaaaatctctcagcatttacttgtctgtaaaggatcttatttctccttcacttatgaagcttagtttggctggatatgaaagtctgggttgaaaattcttttctttaggaatgttgaatattggcccccactctcttctggcttgcagagtttctgccgagagatcagctgttagtctgatgggcttccctttgtgggtaacccaacctttctctctggctgcccttaacattttttccttcatttcaactttggtgaatctgacaattatgtgtcttggagtggctcttctcgaggagtatctttgcggcattctctgtatttcctgaatctgaatgttggcctgccttgctaggttggggaagttctcctggataatatcctgcacagtgttttccaacttggttccattctccctgtcactttcaggtacaccagtcagatgtagatttggtcttttcacatagtcccatatttcttggaggctttgttcctttctttttactcttttttctctaaacttctcttctcgcttcatttcattcatttgatcttcaatcactgataccctttcttccagttgatcgaatcagctactgaagcttgtgcatttgtcacatagttctcgtgccatggttttcagctctctcaggtaatttaaggacttctctacattggttattctagttagccatttttctaatcttttttcaaggtttttagcttctttgcgatgcgtttgaacttcctcctttagctcagagaagtttgatcgtctgaagccttcttctctcaagtcgtcaaagtcattctccgtccagctttgttccattgctggtgaggagctgcgttcctttggaggggagagacactctgatttttagaattttcagcttttctgctctgttttttccccatcttttttggttttatctacctttggtctttgatgctggtgacgtacagatggggttttggtgtggatgtcctttctgtttgttagttttccttctaacagttaggacccttagttgcaggtctgttggagtttgctggaggtccgctccagactctgtttgcctgggtatcagcagcggaggctgcagaacagcgaatattgctgaacagcaaacgttgctgcctgatcgttcctctggaagcttcatctcagaggggtacccggccgtgtgaggtgtcaatctgcccctactgggggatgcctctcagttaggctactcaggggtcagggacccagttgaggaggcagtctgtccgttctcagatctcaaactccatgctgggagaaccaccactctcttcaaagctgtcagacagggacatttaagtctgcagtagtttctgctgccttttgtttggctatgccctgcccccagaggtagagtctacagaggcaggcaggcctccttgagc

SEQ ID NO: 664 - DNA, 114 bp, Homo sapiens
ttttatatttttagtagagatggggtttcactgtgttatccaggatggtctcgatctcctgacctcgtgatccacccacctcagcctcccaaagtgctgggattacaggtgtga

SEQ ID NO: 665 - DNA, 391 bp, Homo sapiens
agcacctctctctctggctagcctatttcgacgccacacaccactccaccctccgtcacctctctccccacttctctcactcttggatgacaagccctgagcgctgggccgtgtggcttcctccccatggctcttggcctctccttatgagctggaaggcaccaggcagggtcctcggaaccccctggcggctcactttgggtacccaggtgggctgctggcggtgtggggtgtggaggtgcgttgtgttggggaaaaacagcctaaggctagttttggggttttgtgggggtgtcttctcacctgcgtactcagaacttttgaaaatgggactagcccgaggacaggtgggctcagaacattgcaagcctgcgttccacacaagaaaggt

SEQ ID NO: 666 - DNA, 391 bp, Homo sapiens
agcacctctctctctggctagcctatttcgacgccacacaccactccaccctccgtcacctctctccccacttctctcactcttggatgacaagccctgagcgctgggccgtgtggcttcctccccatggctcttggcctctccttatgagctggaaggcaccaggcagggtcctcggaaccccctggcagctcactttgggtacccaggtgggctgctggcggtgtggggtgtggaggtgcgttgtgttggggaaaaacagcctaaggctagttttggggttttgtgggggtgtcttctcacctgcgtactcagaacttttgaaaatgggactagcccgaggacaggtgggctcagaacattgcaagcctgcgttccacacaagaaaggt

SEQ ID NO: 667 - DNA, 488 bp, Homo sapiens
aaagttaaatctttctatttatttcaagaaagaacaaggcaagtggacttggacattttctatgaaaatagacaaacagaaaataggaccaagtagttaatcacattcatctcaacattgaagtttcaaggcacctacaagaaggaggccaaagggcggttcgcagtgcactttggtttgtgttgttgtcgtggtggtgggtgtttgcgtgtctcggttttctggaaacccttgcctggtggtgaggttgggagcgaagcaggtgggcacgaggccaggctggtctgggccctgagaagccgggccgggtcagccatctggtcgcatggcagcaggcggtagcggggacggtcaggcccgtcactcaggcccctgagacggcttccaagaaaaagaaaggagatagtgctgcacctgggcggctgattctggaggtgaggaaggctggggggcgtgggaagtgggggtactggcacagtgtgcccctt

SEQ ID NO: 668 - DNA, 249 bp, Homo sapiens
ccccagttctctcccccttgtcatccactcaaggcaagtcttggagaagggaaactgagttactgacacaggttggggcagccaccggatctctcagagtggctacatttctccatctggctcacagctggcaacacgtggatccaaggcagggtggagcgaggtgcttccaagaggtaaagctgctgagatgagcccctctctgtgccagctgctggcggggcaggagcaggacgagagaagcctgtt

SEQ ID NO: 669 - DNA, 543 bp, Homo sapiens
ttcagagtgaacttccaggcaagtggtgagttcttggggcatgtcagccaaggaggctctgatttaggcttagccagagtctgattaagaaaaggagggtgggactgggctgatgggactcaggctgtggagtgagaagggagggcatggggagagaaggaaggctgggcaggagctctaagagaagagggcttttgggaactgagggtgagcaggggcagaatgacatccctcctttacccagtgcctaccgtatgccaggcactgttctgagcacctagctcgtgttaattcatttagccctcacaccatcaggcgtgctcccccatcttacggaaaaggaaagtactgcatagggaggctgagtaacttccccgtagtcacgtagcaagtaagtgctggagccagtgttaaacgcaaacgccgatacccatagacttaactctgaagttctgcaactgcttacaggaagatgcggatgcttcggggaaggaggggccaggtccctgaagcctcgtattgctccctgccaattcctctcca

SEQ ID NO: 670 - DNA, 450 bp, Homo sapiens
gggcggccaatggtgacatcagccactgggctggctctaggatgtctacatcccatcttgtagccagagtcctcccaatcggggactccccctgcccttgacatgtgggacagagtgggggtgagaagaaaggtctgaccactgggtgcagactcccccactctgccaggggcctgcacagcataacctagagggcaatgattcccaggctggtctgcccttagaattatttgggatctttcaaaaatgctaaagcccagaccaactatgtcatgtctctgggggtgggacccaggcttctgtatttgtgaaactcctcaggtgatcccaaagtgcagagaagcttgggaaccactggaaggggcttcacaccttctcaaagccctttcagacccacttttccatttgaacctcaaattaaacctgcttgtttcacagggcagggttttt

SEQ ID NO: 671 - DNA, 657 bp, Homo sapiens
cacaaactgagtttcttgctgcacgcagggatcgtttcagctttcccgaaaaggcagcagtctctgttgtggaaagtgacagctgttttacagctgcaaaagcaatgtactacaatatgactttgtttttgtttcctttcacattagtgtatctcctagctatggactaaataatacatggggggaaataaacaagtattcatgagggtgaaaatgtgacccagcaggaaaattacaactattttcaattgacgttgaatagggtgagtaaattttagctttttgagttacaatttggctgagatatcagagttagtactgatatagaaagatatttttgtcatctataaataattcctgagagtcacttctgtagaatgttaataaaaatatatggtcccctagcatataaagagaagaggattatattctgctagtgccatttttggattaccctaagtaaatctatgttagaggaaaaaataactcttcagaagcagcaaacctcatctagaacagcttgtttaaaagcctagacctggccaaattttgctgtttccttgattcttcttggtctgggttccagctataatttgtgttttatatgtgttgctgtttgtatgacatgttatggtttgcaggaggtctctgagtagg

SEQ ID NO: 672 - DNA, 657 bp, Homo sapiens; identical to SEQ ID NO: 671

SEQ ID NO: 673 - DNA, 657 bp, Homo sapiens; identical to SEQ ID NO: 671

SEQ ID NO: 674 - DNA, 416 bp, Homo sapiens
atctgagtggcaactgcctgaagcagtaggggaaggactggaggcagggagtgcaattgaagtgagtgtgacaacctgcaagtgataagggggtgggtatggtagatacatgagagaagagtacacaaggtttagtgattatgctgttggaaggggaggaaccagaggtgattctgaagtttggaactgagcgactgagagaatgataaaaatagggaaatcaaaattggaagtcagtagggtatgggatagggtaggtcagtgagtagcgtagttgatggacatgaacaggaagagtagaacagtgtcaggaggctgaggccggagaatcacttgaacctgggaagcagaggttgcagtcagctgaggtggcgccagtggactctggcctgggggacagagcaagattctgtctc

SEQ ID NO: 675 - DNA, 4987 bp, Homo sapiens
ggaagaggtgcacactcctgccacagagattcatgtctttgatgtggcaatgtctctgcgtggtgggggccaagcctcagtgttgaagtaggttatctcattaagcatgaggggagggagtctttgtgtctgcttggaaaaaaatctctcttctgttccactaagcgaccaacttccataaaagtagaggaaataatgattactttccaagcagagtctacattgccaatgtgtgtgtggagtgggaggtctcatctagtcttgctgttagcattaaaagtttagactttttttttttttaaaaaaagagagagggtcttgctctgtttcccaggctggaggacagtggtataatcctacctcattatagcctccaactccagggctcagtcgatcctcctgcctcagcctccagagtagctgggactacaggtgcacaccaccatggccagaaaatttttgtattttttgtagagatggggtctcaccatcttgcccaggccagtctcaaactcctgggctcaagcgatcctcccttcttggcctcccaaagtgctgggattacaggcatgagccatcatacccagactagacatttgacttttgattatttccttcattaccttttttttttttaaaaaaaacctctccctggctcttctctgctttctttctgaagtttttctttggattgttctctgttcccacagtggccctgccttggtgttctgggactgacagattgattcatcattgtaaatatcagttcttggatctgagctagcaatgtgggagagttttattttagcaaaggtgggcttggtttgttgacaaaagagcaatttctcatgccttataaataaggtaacaacattgtgtactttctaaagaaattccaacagaatgggtttcctgaaacggatttgcaggaattcctgaaggaatgcagtagcaaagaagagtatcagaaagagtcctcagccttcctgtcctgcatctgctgtcggaggaggtcagtatcatgtttattctccatgctcctgagatgggctgttctgttgtcttaagaaagagcccctccaagattaccattacattcagagaccagcttatcatgggaaataattcacctttcttttctttcctcccactgaaattggctttagaaatgaattatttcttctaaaacagggttatgtagaaagctacacgatgtgattggaatctcttagaaatactataagactcttaagagaaggcataaattatgtccttaaagtcaagaggctgaactcttaagtggcccaagtaagaggtcaaagctcttatttttagaggtgaaactctgggagtgtcagaggtgttttcccttttcacagtatgtggtacaagcaatctttcttgatgagagcaggaaacttccttgcgaagaggctgtccaagtgcttgcttatccgtgcacaccagtagctcttccttgcctagctgtgctttgcctgttgttcgtcaggacatgtagagaaatggtctagacctcagtggacaaagcatattacatagtgatttgtggactagaatggggtcaggtgaagacaattttttttttaatgtgcctatgtttgctttcatctgaagtcaggggtgccagtttgtaactaaaagtataccctacatatgttttttctttttggaaggactctgtaacccaaattcctgaaggaagctatgagaacataattgctatttaaaaccacaggatgcatttttctgttaatcaattcatacagcatcttgggacttacaatgatatgactgagcagatccagagaatgtctggtaaatagaaaatgagatctgagaagagttgttttcagaatcacacctttttttctcagagcattaaattgttgctgtgaaagctgggataaaggaaattaattttcttaataggcagctgcctcctaagaggtaccttgtataaggaaagtctctcaaaatctcttttttactataagggggataaacttcattgaaaaatgtagtcatgaattctaaaaagtaaacgataggtctttggtgtttggaccttggtttgtgccacacaaagtcctgggaggttgttaaatgttttgtcatgcagccctatggaacaagtgaaagatttaaggcgtggaccccaagacgtttgggtaagattgggtctgagtggtgagacgcaaggagcaacagcagcagaccatttgccctaaagtgtgctgagggttgttgagaagatgcatggtgagacggagggtctgcccctcatgaagagtgaaagaatttgagggaacaagagagcccaccaaggagatcaactgaagaactaggatgatgaaagttttgaaaaagaggatatcaaaaaacaaagacaggtagctgtaactatgtttggccaaacgatggtcctgagtgaagtcagctatagcaatttcagtggaatcatcagaccaaagcctagatcccagggggcttgcatggaccctgcagagtgaatgaagggcctaggctgtgatggaaggaaatggattgtaatggggccttgagaacaagtgatggctttgactccatctaaaattaagtatagcttgatgtgtttaaaagctaggaatggggctggttatggtggctcgtgcctgtaatcccagcactttgggaggccagggcagaaggattgcttgagcccaggattttgagatcagcgtgggcaatgtagtgagaccccgcctcttaaaaaataaaataaaagctagggacagaagaatggactaaaattgaggaaggctgtgaatggaggctaaagatgaacataaagattcatctctgcaaagattggtttttgtgccccctgtctggtgaccatgacagatgacacctgctatcccagtgctgcttcctgcagagcacggctgtggtcactcttcaacaaagcagtccaacaaccagcacacatttgattctcctttgagtttttgacagagcctctagcctgagcatcagaacacctgggttttcattttggacactgccattaaccaagtgtgtcctgtgacctctcctaaacctcttagatggaccagatgacctctgaaacctcttccagttctaaagcgatgtggttctttggagagagatgcttggttgaacagatgcagagttaacctttaccttcctctattgcagtgaaggaggaaaattggctgttctagtaatttataaggccttgttagcgaagggacacagagattctttttttttttccagaaacaaaccaatgtatttattgagtaaaacctaaatgtaacatatatttttctttttttttttttaattttactttaaattctgggatacatgtgctgaacgtgcaggttacataggtacacatgcgccatggtggtttgctgcacctatcaacgcatcatctaggttcagctctgcatgcattaagtatttgtcctaatgctctccctcccctttccccctaccccccaacatttccccgtgtgcgatgttcccctccctgggggcatggaggttcttaagagacaggtgactcctcacagtgtttccaaaagcatctgctcaaacctcaaacagtgtacattgcctttatttatttatttacttattttttctgaatgttggtaaataatcagaataccttgcctgtcttaatttttcttcctcttctatgtttcactcaacatgtctataatctacgggcctagaatatagagtattcctattgctcctcaaagatgttaaagtattgtatctttcctcttttcttctttccctttctgttacaggaaaagaagtgatgatcacttgatacctattagctaaagttctgctaaagatgattaaagttcaggcatccttatccagcggctgagcagaggaaccccaaatgacttggacaagcagttccaaaatgactctcttatttaattgtggagtgggaaagaggactcacagttagccagctgaccatgactgaagttccagctttactttttataaacttgaatgataaagaatagaccatgggctactactgggcattagtgcaatataacagcgataataaaattctctattagtctgttaatttatgacatgatctcggaatggaaaaagatcatttcagagtgtgcgaaataatagtctttaaccatgtaattaaatatgtgtgtttattgtcaaataaggatttgttttaaaggtgattcttgggtttgaagacatttgttaattcatggtctgtacagaaatgaagctggttgcaataccaatctagagagtccaagctggtgaactattaagctgtttaaagatcacccttggcctggcacagtggttcacacctgtaatcccagcactttgggaggcctaggcaggcagactgagctcaggagcttgagaccagcctgggcaacatggcaaaaacccacctctacaaaaagtacaaaaattagtcgggcgtgatggcaggcatctgtagtcccagctacttgggaagctgaagtgggaggatcacctgagctctggaggtggaggctgccatgagccatgatcgtgccactacactccagcctgggtgacagagtgagatcctgtctcaaaaaaaaaaaaaaatcacccttaaatcaacaaaaagacctcatgctcatgcagtggacatttcttggcctgttttcctgtgggttttcttcagcatgatatgaagcaactgttggcatagccagtgggataaataagaaatggaatcatttggctgcctcgtcacttgtgctaatggtcagttgtacacacatgacatgtggaagtgacctgtagcagcggtcactcattttaacaattgaactctgctgggttgggtatttacctttgtctagaaaagaaatatgatatattttctctaaataaatttattttcatcattcca

SEQ ID NO: 676 - DNA, 668 bp, Homo sapiens
gttttcctacttcttatggtgttctagcatcttaaaataagtaagttaccactactacaatgacaaaaacaatgttaacaaaacaagctaactagatatcctctgctttttagaatactctatttcagaaactagtttttatttccccctacagtttgaaaatctgaacacagttgctgagtgtctgttttctctggtcaacggtgatgacatgtttgcaacctttgcccaaatccagcagaagagcatcttggtgtggctgttcagtcgtctgtatttatattccttcatcagcctttttatatatatgattctcagtctttttattgcacttattacagattcttatgacaccattaaggtaagtaattatcaaaatttgctgccaaaaaatcactgcaaattctatatagattataggaaaataccacattttaaaaacttaaaatattacagttcagattttgaggttttgtggacaaactttttagacgctggagatgaattttagggcattgtccctgttacccacagcagggtggattggtttggaggggtggtgggaaagaaaagggaaatggggtaagcatgggttgaatggggtaagtcaggtagtcaggctgctggtcttagccctgacagatatacctgccagtgtggctgcctgg

SEQ ID NO: 677 - DNA, 629 bp, Homo sapiens
atttttaggcctattcaagcagatttaccttttatcagcactgctgtattccttattcatctaatggtagttcagagcatgaagaagtttaggaaaggtgatatctgagaataatagaaaaataatatccataggttccttcctttagggccttagagtttatctgaggaatagagtagtgcatgtgatgaaggttttaaagtagagtgttagagctgtgggtcatactagaataatagaaaaattggtcagagagaatgagttgatctgatgatgaggtaagagagttctgtggagctgaagattagtttcagttgctaagttgttacttgtttctaatcttacagattgttttagcttgagaatgtgtaaaatgggtagatctctttgaacaagctttttccctaaagagtgtagacttggccgggcatggtggcttatgcctgtaatctcagcactttgggaggccaaggcgggcggatcacgaggtcaggagatggagaccatcctggctaacatggtgaaaccccgtctcagctaaaaatgcaaaaaattagctgggcatggtggcacgtgcctatagtctcagctactcaggaggctagacaggagaatcacttaaacctggg

SEQ ID NO: 678 - DNA, 483 bp, Homo sapiens
tggagattttcttctcttttgacttgggctatgtaatttttcaaaattatatttcatctgatatctgtagggagactgtcagatcgtcccgcccggctactggacttggaagcaagtctcatttctagctttctgattcattcttgagcaaaacggtcacttttgattgaaaagagttggtatagtaaaactctctaggtcatttttaatatctgaaaatacttctgattgttgaaaactaagaagaaccttttatgttatccttaaattcacttcattcttcaggatctgtaagatatttttgccattgacagctgatatttatatgatgttagaccccatcctgggcacatacctgtgtcccgtaacattgtgtttataattcagaataacatgtagaacattccctcagcagagaagtatattaagtgtcataccatgaccaagatgaaatacttctcaacataatgttttaaaagataa

SEQ ID NO: 679 - DNA, 1128 bp, Homo sapiens
gtctataacaaatttttacacttttacatttgtgaaatctatcatatagaagagagcattcagcatgtacaatttaatgagaaataaagttataaaacagatactcatatacccaatgctcaggttaagaaatgtacattgccaataccttagtaagctcctatgtatcctttcctggtcagtttcctgaatcaccccaagagagagaaccaatattctgcttgtaatgcaaataatcttttctttgtatttttaccaattaagtatactggttgtcacactttttaaaacataatttctaaaccatcataaaatgatacttttgtaaatacaaaatcatgtacttgaatgcattggcactgtcagtttactatcagcatttctaaatgtttatgcatgtttgctcactttatgtgcttatctctccatcagccaatgacagttgatcaatatgggatcaatatgggaccacacttcgagtagtactgatgtctacattccttaaaaatagtctaaacaggtagaagtaaacattaataaaatttaataaagtattaaattctatttaataaatagaaatgtcactttttttgtgacttgctgaacatttagtgccatccctgatgatgcatatggctatagtttttgttactgtgtttattattaacataccaccactatgtatttcttccatgaaggcatttggatcattctaccttttttgctattttgaacaaagccattatgaacattcttgtgtatatatgtcaggttgtacatgtgtatgatctcttgagaatacatccagcaatggaattggtgggtcataggatatgtatatcttcaaattaactaggtaatacctaacttttccaaagtaattagtgctttcaccagcagcattaaaaggttccacatttggtattgttagactaaaactttggaaaatctaggcttgtaatggtacctcgttgcttaatttgcatttccatgaggttaattattttttctacaaatttatttaccatttggatttcccctttttgcaaagttgctgtttaaatcatttgcccatttttaaaaattttattgactttttggttaataaaattccttcatatactgaga

SEQ ID NO: 680 - DNA, 1830 bp, Homo sapiens
gggcaacagagcgggactcggtctcaaaaaaaaaaaaaaatgaataagacagtagtctcacctccaggaacataacctagatggtgtagataggatagctgtatgagcaactaatgttacacaggtaatgaagcagagtggactctaagggtctaagatatttacagggtgctagaggaagaagagaatatataggtccaaagacttatttcttagggagttttacatcatctccccacagcagaagccctggttatgtgactatgccagtaattgagtggtttaatctccagtttagggatatgggtattaaccagtccctgttgctacagattgaaagacatattctttaattttgctaacaataaaggtgatgtttgatctcctgagtaacttctccatctcaggagtttccaaattctggaggaaaatacaaggatgttatcctatttttatcattaggaatcagcttccttgctgaaatttagatacaaaagtgacactggtctggcatactctgtttttagtgctggatgattcctaatgatcactactattttgaaaaggcaacagcataagaatttgattaataatgaatggttcaaagaacaaagtctacccagaatttcatcattcgttttggtgtatttcagttatttttatagatatttgtgtattgtttaaagaaattggtattgtactgtctataacaaatttttacacttttacatttgtgaaatctatcatatagaagagagcattcagcatgtacaatttaatgagaaataaagttataaaacagatactcatatacccaatgctcaggttaagaaatgtacattgccaataccttagtaagctcctatgtatcctttcctggtcagtttcctgaatcaccccaagagagagaaccaatattctgcttgtaatgcaaataatcttttctttgtatttttaccaattaagtatactggttgtcacactttttaaaacataatttctaaaccatcataaaatgatacttttgtaaatacaaaatcatgtacttgaatgcattggcactgtcagtttactatcagcatttctaaatgtttatgcatgtttgctcactttatgtgcttatctctccatcagccaatgacagttgatcaatatgggatcaatatgggaccacacttcgagtagtactgatgtctacattccttaaaaatagtctaaacaggtagaagtaaacattaataaaatttaataaagtattaaattctatttaataaatagaaatgtcactttttttgtgacttgctgaacatttagtgccatccctgatgatgcatatggctatagtttttgttactgtgtttattattaacataccaccactatgtatttcttccatgaaggcatttggatcattctaccttttttgctattttgaacaaagccattatgaacattcttgtgtatatatgtcaggttgtacatgtgtatgatctcttgagaatacatccagcaatggaattggtgggtcataggatatgtatatcttcaaattaactaggtaatacctaacttttccaaagtaattagtgctttcaccagcagcattaaaaggttccacatttggtattgttagactaaaactttggaaaatctaggcttgtaatggtacctcgttgcttaatttgcatttccatgaggttaattattttttctacaaatttatttaccatttggatttcccctttttgcaaagttgctgtttaaatcatttgcccatttttaaaaattttattgactttttggttaataaaattccttcatatactgaga

SEQ ID NO: 681 - DNA, 1934 bp, Homo sapiens
tagctatcttgatttcactacagctcagtagcagttcagtgctttggctttggagtcacagccaagttcaagtcatggttgtgtgactttggattttattaactatatatttctgttttccatctgctgctaaggtgatgccatctggtataatgagaatgaaatgagatgtttattaaacactgaggatcagtgcctagcatatacaagcacttagtaattatatttttatcattagtctaattctggtctcttgatctttctttagttcctaaagtccttactatggtttctattcatgtggctcttacatgaacaatacatgacacaaatatgatagtgtttgaatgtctgtcatgcacataatagtctgctagaaatttcgaaaatgaataagactggctgggcacggtggctcatgcctgtaatcccagcactgttagaggtcaaggcgggcagatcacctgaggtccggcattcaagaccagcctggccaacatggtgaaaccctgtctctactaaaaatacaaaaaatagtggggcatggtggcgcattcctgtaatctcagctactcgggaggctgagacaggagaatcacttgaacccgggaggcagaggttgcagtgagccgagactgcaccactgcagtccagcctgggcaatagagcgggactcggtctcaaaaaaaaaaaaaaatgaataagacagtagtctcacctccaggaacataacctagatggtgtagataggatagctgtatgagcaactaatgttacacaggtaatgaagcagagtggactctaagggtctaagatatttacagggtgctagaggaagaagagaatatataggtccaaagacttatttcttagggagttttacatcatctccccacagcagaagccctggttatgtgactatgccagtaattgagtggtttaatctccagtttagggatatgggtattaaccagtccctgttgctacagattgaaagacatattctttaattttgctaacaataaaggtgatgtttgatctcctgagtaacttctccatctcaggagtttccaaattctggaggaaaatacaaggatgttatcctatttttatcattaggaatcagcttccttgctgaaatttagatacaaaagtgacactggtctggcatactctgtttttagtgctggatgattcctaatgatcactactattttgaaaaggcaacagcataagaatttgattaataatgaatggttcaaagaacaaagtctacccagaatttcatcattcgttttggtgtatttcagttatttttatagatatttgtgtattgtttaaagaaatgggtattgtactgtctataacaaatttttacacttttacatttgtgaaatctatcatatagaagagtgcattcagcatgtacaatttaatgagaaataaagttataaaacagatactcatatacccaatgctcaggttaagaaatgtacattgccaataccttagtaagctcctatgtatcctttcctggtcagtttcctgaatcaccccaagagagagaaccaatattctgcttgtaatgcaaataatcttttctttgtatttttaccaattaagtatactggttgtcacactttttaaaacataatttctaaaccatcataaaatgatacttttgtaaatacaaaatcatgtacttgaatgcattggcactgtcagtttactatcagcatttctaaatgtttatgcatgtttgctcactttatgtgcttatctctccatcagccaatgacagttgatcaatatgggatcaatatgggaccacacttcgagtagtactgatgtctacattccttaaaaatagtctaaacaggtagaagtaaacattaataaaatttaataaagtattaaattctatttaataaata

SEQ ID NO: 682 - DNA, 576 bp, Homo sapiens
gtctatcaacaaatttttacacttttacatttgtgaaatctatcatatagaagagagcattcagcatgtacaatttaatgagaaataaagttataaaacagatactcatatacccaatgctcaggttaagaaatgtacattgccaataccttagtaagctcctatgtatcctttcctggtcagtttcctgaatcaccccaagagagagaaccaatattctgcttgtaatgcaaataatcttttctttgtatttttaccaattaagtatactggttgtcacactttttaaaacataatttctaaaccatcataaaatgatacttttgtaaatacaaaatcatgtacttgaatgcattggcactgtcagtttactatcagcatttctaaatgtttatgcatgtttgctcactttatgtgcttatctctccatcagccaatgacagttgatcaatatgggatcaatatgggaccacacttcgagtagtactgatgtctacattccttaaaaatagtctaaacaggtagaagtaaacattaataaaatttaataaagtattaaattctatttaataaata

SEQ ID NO: 683 - DNA, 1431 bp, Homo sapiens
ctttgtattgcttatattgcatctgagattgtttgtatcttttttccttgactagtcttgctagaggtttatcatatttattgtttttgctttacaaagaagccaatatttttgtttttcttctttgttatattttctctattttgttgatttcagctttttcttttctatgttaatatgtcatattattgtagtggatggttagctcttcaaattttcaactttctattctgatttacatatttaaagctatagatttccatgataatgctactttatctcttgcgttagttttctatgctgggtaacaaattaccacaggtttactggtttataacagcataattttattatctcacaatttcttggggttaagagtttcagcatggcttaactgggtcctctgtttagggtctcacaaggctgcagtgaagtcagctgaactgcattgtcatctggagctcacagttctcttctaaattaatcagattgttgataaaacttagttccttgaagctgtagaactgaggtcctcagctacttagggctgctcttttatataagcagtgtaacgtgacatgcctttttaaggtcagcagaacttctgactagaatctgtttcagagaaggccagaaagagttcacttggttaggtcagagtcacctgggatagtctcccttttgattaagtcagagtcaactaaataggcaccttaattgcatctgcaaaatcctttcacttttgccatattctcttactaaatgtaacaggcgttgtccacacaaaggtatggatatggggcttggaaaggatttcaggaaccatcttagaattctgcctactactaactccattctacaagtctcaatatctagcattttagttattcactaactgcaaagttttttatttcattatcattactactttgatccatagatactatttggaactataatttccaaacatgaatatttaagttttcctttattgttgatttttaacataattgaattgtgatcagatgatatattctctatatgatttaaattctttgaaatgtgttaacagttgctttatgacataataagtggctggtttttataaattttaggatgcttgaaaagagttctacagttatttatgttcattaatcattttagtcatgttcattaattttcaagtcttcagtatccttagtgatgatttttttgtttttggtatatatctcttgattactaagagaattgtgttaaaatgtagctagcatgattttagatgtgtttgtgtgattctttcaatttctctctttttctattttgtattgggatacaaatgtataattgttatattttccaggttaattgaaagaagctttatcattacaaaattatctttatttccactaataaattttgccttaaaattaa

SEQ ID NO: 684 - DNA, 243 bp, Homo sapiens
tagctatcttgatttcactacagctcagtagcagttcagtgctttggctttggagtcacagccaagttcaagtcatggttgtgtgactttggattttattaactatatatttctgttttccatctgctgctaaggtgatgccatctggtataatgagaatgaaatgagatgtttattaaacactgaggatcagtgcctagcatatacaagcacttagtaattatatttttatcattagtctaa

SEQ ID NO: 685 - DNA, 157 bp, Homo sapiens
gaaataactataaatataggttaacatttattgaatgcctaccttgtgctaggtgctgtgctgagtatttgtattgacacatttaatctttgcaatgattctatgaaataaaggtattatttccattttacagatgaggaaactgaggaatagaggg

SEQ ID NO: 686 - DNA, 591 bp, Homo sapiens
gtttaatttgaatgaaatcaaccatttagaataaattattggaatacagggaatagaaaagaagtttaaatagcattcagaagaaataattggataagtccaggaactgggagattctacctgacaactggcctggatctttaaaaaatcttgaaacaagttatggttctttgtagaataaaagagacccaagagacattaacagtgtgtgaacctaaattgcatcctggaacaacaacaacaaaacttcaaatatatttttgaaaaattagagaaaaataaatatggactggatattaaatattaatataaataatagtactgtgtgactatgttggagattacttattcttgggaatacacttaaagaaagatgaaataaagatggtaaaataaaatatagattatgtctatatgtaaattagtaaatagaaatagagcaaaaaataaatggataaagcaaatgtgacaacataatatttataattctaagtgaagaccatagcctgttcattgctctactcttttaattttccacagacttaaaagctttcataatgaaaacttttgggaacaacagagatccaaaaa

SEQ ID NO: 687 - DNA, 591 bp, Homo sapiens; identical to SEQ ID NO: 686

SEQ ID NO: 688 - DNA, 486 bp, Homo sapiens
gtgaattcatagatatttatttcatactttgggacataatccaacagtacattattttgttactcaaattgttctactttggccattgagagctctttccattggttcctgtgttcctttgtttgtttgcttcttttgagcatttcttgctttccgacactacaagatgctttaggctcatcttgtatattccctgccccagccctagaatcagccgtttatccaaggagccctgattcctttcattggagaatggtattggaaacaaagatctagacactggctctgtttgttactattggggtgtctttgcttctaggccctctcagaagacagcgctcagaaatattggccaggcatggtgccccatgcctgtaatcctagcactttgggagggtgagatgggaggatcgtttgaggccaggaattcgggaccagtctggtcaacatagcaaaaccccatctctaaaaaaaaaaaagaaaaag

SEQ ID NO: 689 - DNA, 486 bp, Homo sapiens
gtgaattcatagatatttatttcatactttgggacataatccaacagtacattattttgttactcaaattgttctactttggccattgagagctctttccattggttcctgtgttcctttgtttgtttgcttcttttgagcatttcttgctttccgacactacaagatgctttaggctcatcttgtatattccctgccccagccctagaatcagccgtttatccaaggagccctgattcctttcactggagaatggtattggaaacaaagatctagacactggctctgtttgttactattggggtgtctttgcttctaggccctctcagaagacagcgctcagaaatattggccaggcatggtgccccatgcctgtaatcctagcactttgggagggtgagatgggaggatcgtttgaggccaggaattcgggaccagtctggtcaacatagcaaaaccccatctctaaaaaaaaaaaaagaaaaa

SEQ ID NO: 690 - DNA, 486 bp, Homo sapiens; identical to SEQ ID NO: 689

SEQ ID NO: 691 - DNA, 489 bp, Homo sapiens
ataaaaccatactgatacttacaatttgaagtccatacattattcagatttccttaatttctacctaatatgcattttctcatccacaatcccatccagggtgccatgttacatcatttcttttcctttttgagacagagtcttgctctgacacccaggctggagtgcagtagtgccatctcggctcactgcaacctctgcctcctaggttcaagtgatcctcctgcctcagcctcccgagtagctgggatgacaaacatgaaccagcacacccggctaatttttatattttttgggagagatgcgtttcaccatgttggccaggctggtctcaaactcctaacctcaagtgatcaacctgcctcagcctcccaaagtgctgggattacaggcgtgagccaccgcacccagccaacattatatttcattgtcacttctctttagactttccttgtttttgatgacattgacagttttaaggaacagtgg

SEQ ID NO: 692 - DNA, 489 bp, Homo sapiens
ataaaaccatactgatacttacaatttgaagtccatatattattcagatttccttaatttctacctaatatgcattttctcatccacaatcccatccagggtgccatgttacatcatttcttttcctttttgagacagagtcttgctctgacacccaggctggagtgcagtagtgccatctcggctcactgcaacctctgcctcctaggttcaagtgatcctcctgcctcagcctcccgagtagctgggatgacaaacatgaaccagcacacccggctaatttttatattttttgggagagatgcgtttcaccatgttggccaggctggtctcaaactcctaacctcaagtgatcaacctgcctcagcctcccaaagtgctgggattacaggcgtgagccaccgcacccagccaacattatatttcattgtcacttctctttagactttccttgtttttgatgacattgacagttttaaggaacagtgg

SEQ ID NO: 693 - DNA, 489 bp, Homo sapiens; identical to SEQ ID NO: 692

SEQ ID NO: 694 - DNA, 1520 bp, Homo sapiens
gcggccgcgggaagaaggggaaagcggaggctccccgggaaaaaagcgcgagagaatggagttgagaggaaagaaggaggatacaggcggccaatgtgtggcctacgtgggagcgccccgagcgctccacgtccccggcctgcgccgggcggccccttccccgggcatcttggcaacgcgcctggcccaagccggaggggccccgcggccccgcacgcctcctggaccagtcaggatccaggctcctctttgagcccgcgggtgtttcatgggggtagaagtctaacccctccaccccctctcctccccagcagtcccacgcgggtatgggagagaatgaagttctttgtctctaagggattcaaaccagaaacggagggacctctggttcccagagggaggaaaatccatgatgtctgctgcccagggagctattgccaccgcctccttgggatgaagtattgccagctaccaacagttccttcccaacggccatcttccagccttcttaaacgactcctagcatcttcgggaggctcctgaaggactgaagcaaaggaaatctctgaagggatttagtccttgaaagggagtagggatacttagggtgttctgtgttgagcgcttcttcctatctctccagcttcatgtatgtgtgtctttatgtccaagcaattgagccaacaagtcctcagaattccttgtgaaaaaaacgttttttttttttgagacggattctcactctgtcgcccaggctggagtgcaatggtgaaattcagctcactgcaacctccgcctccggggttcaagcgattctcctgcctcagcctcccgagtagctgggattacagtcacgcgccaccacgcccagctaattttgtatttttagtagagacaggatttctccttggtcaggctggtctggaactcccgacttcaggtgatccgcccgcctcggcctcccaaagtggtgggattacaggtgtgagccaccgtgcccagccctgaaatagtcttaattgcttgtttttcttttttgtctgaggtgtgctttttaaaatctctatggagatggagaagactgacattctctggcctgatgtgaaaacctctcattaaaactgtgtctgtgctttgtgggctgaaagcatgaaacactggaaattttaaacaaacgtatgtgaatgtgttaagaagccaagagtccggccctctttcaccagactgtatggcctcagatcagcaagggaagtattgagcttagggacaccaagtaatggagtgagcagggatgagagggcacatagaatgtggtgatctctttccatgtcaaggcttgtgtgtttgtggcactggggtcttgctgtgtccccaaggctagagtacagtggcacaattatggttcactgcagcctcaacctccagggctcaagtgatcctcccacctcagtctcctaagtagctgggacaacaggcttgggctgccacacctggctaactttttatttttttgtagagac

SEQ ID NO: 695 - DNA, 116 bp, Homo sapiens
agacgtggaggccgcggctgaggcccgccgccggcccatgggggcctcgccgccgcctctgctgccgccgccgccgccttcgcctcagaggcaggagctcgcacccagccgccccc

SEQ ID NO: 696 - DNA, 690 bp, Homo sapiens
attaggagggaaggtagaagtaagtgtctaacctctgaccctcatgagcctcatgggtccttacgggccatgtcctttggtttccgtgtggctttctcttttggaggatggagggtacttctttgttcccagggaagaaaggtgggacacattccagcacacctgtctagggcctggcgagggcttagcaggatgggaatcctgtctggagagggtgaaaggactgtcgcagtcagagttcccaggaaacctccgatacccgtgtggggtgtgcagataggctcttcctccatggccttcacggttgccatggtagcagcctggctttgcaaaactcagagcttccatccaggcaaatatgtacaggaagcaggagcaggctggagccagagggtcgtgtagacacagtccccagaaagatgatgtagtggagatgattccgggcactctctcctcggcgtggtctttacagagatcagctgctctgagaggctccccttggtaaagccttctgccttcctttgtccccgatctggggacttcatgtctcattaggtccagctcttctccctcttcatcgtataaaccaaaaaggcatcaggcattttgactcaggcccacattagggaagaacaccttgtaatttgccagatatgaactacagcaatggaaaaggaagtgtgcatggcc

SEQ ID NO: 697 - DNA, 125 bp, Homo sapiens
gagtctcactctgtcacccaggctggagtgcagtggtgcgatctcggctcactgcaaccttcacctcccgggttcaagcgattcttctgcctcagcctcctgagtagctgggactataggcgtgt

SEQ ID NO: 698 - DNA, 311 bp, Homo sapiens
tttttttttttttttttttttttttttttttttgagatggagtctcgttcttttgcccaggctagagtgcagtggcatgatctcggctcactgcaagctctgcctcccgggttcacaccattctcctgcctcagcctcccgagtacctgggactacaggcgcccgccaccacgccgggctaatttttttgtatttttagtagagacggggtttcactgtgttagccaggatggtctcgatctcctgacctcgtgatctgcccgcctcgacatcccaaagtgctgggattacaggcgtgaaccaccacaccc

SEQ ID NO: 699 - DNA, 549 bp, Homo sapiens
gctgttctgtctgaattaagtggtaaaatgacattcgtggagaggattaaaaatttaatacatgtgctttattttgacttttggtttcaaatgtttgatacgagaagtgggagaagttttacagtgaagttctaggtaagtcatgtttctaatcaatggttaataagttctaactttccttttgcctttgaaggtgagcgtatataaatataatgtaagaagatagtgttgtttaaatgaaatgatgaatggcaaatgtaagatgatctatcaatctcacaaatattatagaaatgttgatattataggctcagctagaaccctttggccatcgctcctataggacactacaggaattaaaaaaaaaaaactacaaagtaaagcacttatgatttctttaagcaactatataagtattttactatacttttttcatctttaaaaaaggcaatacatatatcaataaacaacttgatgaaggcagacatttagatgaggagctacacatatttctagcataactattaatgcagcattgagaaaattgtt

SEQ ID NO: 700 - DNA, 15783 bp, Homo sapiens
ctctgttgcccaggctggcgtgcagtggctcaatctcggctcactgcaagctccgcctcccgggttcatgccattctcctgcctcagcctcctgagtagctgggactacaggcgcctgccaccacgcccggctaattttttgcatttttaaaagagacgagatttcaccgtgttagccaggatggtctcaatctcctgacctcgtgatccgcctgcctcggcctcccaaagtgctgggattaccagcgtgaaccaccacgcccggcctaaacagttccttttgaaagtaataagctcggtgtcttgggataattgctcagggtctcagacaacttctctccctaagatgacatctagacacccatgttcacagtggcattattcacaatagccaaaaggtggaaagaatccaagtattcactgacagatgaatggatgagcaaaacattatacaatgaaatacattattcagctataaaaatgaaattccaggccaggtgcggtggctcacatctgtaatcccagcactttgggaggccgagccgggtggatcacctgaggtcaggagatcgagaccagcctgaccaacagggagaaacctcgtctctactaaaaatacaaaattagccaggcgtggtggcgcatgcctgtaatcccagctacttgggaggctgaggcaggagaatcgcttgaaccctggaagcagaggttgcggtgagccgagatcgtgccattgcactccagcctgcgcaacaagagcgaaactaggtctcaaagaaaaaaacggaaaagaaaaaaaaagaaattcctttacatactacaacatgaatagatcttggaaacattatgctaagtgaaataaaccagacacaaaaggacaaatattgtatgattccactcatatgaggtatctagaataggcaaattcattgagacagaaagtagactagaaccagaagctgaatggggtgcggtgggtagtactgcttaatgactgcagagttgttgcttggttgatgaaaaagttctatttctggaaacagagagtggtgacggttaagcaacactgtcttggtctttgttgttgttgttgttgtttttgagacggactctcactctgtctcccaggccggagtgcgatggattagacctgctaggggagcacttggcaaaactcaacccacagggccttcccctgcctagcaagactgtgctgtcaaatttattcacatgtggctctggtcaagactagcatgcaatcagcctatgagggcattattatattattattcccattttacagatgaagaaactgagaagtcaaaccattaagctgaacccagtttgctttgaccacaaatccagccctcacaggcgcagtgatgcatgtgatgcgtaaggctgggatgttgttctgtatttgggagttttgtttgcttgtttgcttgtctgacatggagtctcactctgtcacccaggctggagtgcagtggcgtgatctcggctcactgcaacctccgcctcccgggttcaaggactctcctgctgcagcctcccatgtactcaaagagtttgacctttattctttggataatgaggagctagcctagcacctggtccaaggaggtgctccataagaccacctattgatttgtgcttattatctgtctccctccaatggaatgtaaaggaggtgggggcaaagactttttgctttgttccctgctgtgaacatgcctggaactttctatgagctcagtaagcaaggaaagaaggaaggaagagatcttgagatagtaacagcaacctaagcgttttacacacgtcatcttaatctccaaacctcatgaattctctctctctctctctcattttttgagacagagtctcgctctgtcacccaggctggagtgcagtggcgtgatctcgactcattgcaacctctgcctcctggattcaatcaattctcatgccttagcctactgaggagctgggattacaagtgcacgccaccatacccggctaatctttgtatttttagtagaggcaagattttgtcatgttggccaggttggtcttcaactcctggcctcaagtaatccacccacatcagcctcccaaagtgctgagatcacaggcatgaggtaccatgcagccgcctttttttttttttgagatggagtctcgttttgttacccaggctggagggcagtggtacgatgtcagctcactgcaacctccgcctcctgggttcaagtgattctcctgtgtgagcctcctgagtagctgggactacaggtgcatgccaccacatctggctaatttttgtatttttagtagagacagggttttgccaggttggccaggctgatctcgaactcctgacctcaggtgatctgcccgcctcagtctcccaaagtgctggattacaggtgtgggccactacgccggccctggccctctttctttcttttttgagatgggctcactctgtcacccaggcaggagtgcagtggtgggcttgaggctcactgcactgcagcctccacctccctggagtcaagtgattctctcacctcagcctcacaagtagctgggactacgggcatgtgccacaatgcctggctaattttttaattttttaatattttttattttatttttttttgagacagagtcttgctctgtcacccaggccggagtgcaatggtgtgatctcggctcactgcaacctctgctcaagcaattctccctgcctcagcctcctgagtagctgggattacaggcgcctgccaccacgcccggctaatttttttttttttttagtagagacaggattttgccatgttggccaggatggtctcaacctcctgacctcaggtgatccgcccacctcagcctcccaaagtgctcggattacagatgtgagccaccacgcccagccttatttttattttttattttattttatttatttattttgagatggagtttcactcttgttgcccaggctggagtgcaatggcgcgatcttggctcactgcaaactccaccccccaggttcaagcaattctcctgtctcagccccctgagtagctgggattacaggcgcccgcccctatgccaggctaatttttggtattttttttagtagagatggggtttcaccatgttggccaagctggtctcgaactcctgacctcaggtgatccacctgcctcggcctcccaaagtgctgggattacaggcgtgagccaccgcgcctggctatttttattttttgagacagagtttcacttttgttgtccaggctggagtgcaatggcacagtctcagctcactgcaacctctgcctcctggtttcaagcgattctcctgtctcagcctcccgagtagctgggattacaggtgtgcaccaccacgcccagctaatttttgtatttttagtagagatggggtttcaccatattggacaggttggtctcgaactcctgacctcaggtaatccacccgcctcggcctcccaaaatgctgggattacaggtgtgagccactgcacctggccctgtatttttttgtagagatggggtttcgccgtgttgcccaggctggtccccaactcctaggttcaagcaattggtctgccttggcctcccaaagtgccaggattacaggtgtaagccattgcacccagccaagattaatttttttgaagtcacacaactaggcaagttagcaaaaccaagatttaaacctaggcatccgagtccctgccttcaaacctgggtgtttaacactatactatatagtcctgccgtaggaacctattctagcccaatggcagacttgaggctgagaaaagattcagaaggcctgccagtggagctaaacatttgtgtgtgcagccctgtctctgtataacttccggcttgccttcctattccaggtctctgctgctgatgaagctgtgaccaaacgcacccaacccttggcagccatctgtccctgcagccatagcccacattcccatgacctccctctgcttgttttgggaccatgtctgtacagcctctaggccccagccccggaggtgaatgccatgccatgattctggtgtgctccatggcatccccagcctagctcccaatcccactttggcacgatgttagccaacagctcctcaaccaacagttctgttctcccgtgtcctgactaccgacctacccaccgcctgcacttggtggtctacagcttggtgctggctgccgggctccccctcaacgcgctagccctctgggtcttcctgcgcgcgctgcgcgtgcactcggtggtgagcgtgtacatgtgtaacctggcggccagcgacctgctcttcaccctctcgctgcccgttcgtctctcctactacgcactgcaccactggcccttccccgacctcctgtgccagacgacgggcgccatcttccagatgaacatgtacggcagctgcatcttcctgatgctcatcaacgtggaccgctacgccgccatcgtgcacccgctgcgactgcgccacctgcggcggccccgcgtggcgcggctgctctgcctgggcgtgtgggcgctcatcctggtgtttgccgtgcccgccgcccgcgtgcacaggccctcgcgttgccgctaccgggacctcgaggtgcgcctatgcttcgagagcttcagcgacgagctgtggaaaggcaggctgctgcccctcgtgctgctggccgaggcgctgggcttcctgctgcccctggcggcggtggtctactcgtcgggccgagtcttctggacgctggcgcgccccgacgccacgcagagccagcggcggcggaagaccgtgcgcctcctgctggctaacctcgtcatcttcctgctgtgcttcgtgccctacaacagcacgctggcggtctacgggctgctgcggagcaagctggtggcggccagcgtgcctgcccgcgatcgcgtgcgcggggtgctgatggtgatggtgctgctggccggcgccaactgcgtgctggacccgctggtgtactactttagcgccgagggcttccgcaacaccctgcgcggcctgggcactccgcaccgggccaggacctcggccaccaacgggacgcgggcggcgctcgcgcaatccgaaaggtccgccgtcaccaccgacgccaccaggccggatgccgccagtcaggggctgctccgaccctccgactcccactctctgtcttccttcacacagtgtccccaggattccgccctctgaacacacatgccattgcgctgtccgtgcccgactcccaacgcctctcgttctgggaggcttacagggtgtacacacaagaaggtgggctgggcacttggacctttgggtggcaattccagcttagcaacgcagaagagtacaaagtgtggaagccagggcccagggaaggcagtgctgctggaaatggcttctttaaactgtgagcacgcagagcaccccttctccagcggtgggaagtgatgcagagagcccacccgtgcagagggcagaagaggacgaaatgcctttgggtgggcagggcattaaactgctaaaagctggttagatggaacagaaaatgggcattctggatctaaaccgccacaggggcctgagagctgaagagcaccaggtttggtggacaaagctactgagatgcctgttcatctgctgacttctgtctaggctcatggatgccaccccctttcatttcggcctaggcttcccctgctcaccactgaggcctaatacaagagttcctatggacagaactacattctttctcgcatagtgacttgtgacaatttagacttggcatccagcatgggatagttggggcaaggcaaaactaacttagagtttccccctcaacaacatccaagtccaaaccctttttaggttatcctttcttccatcacatccccttttccaggcctcctccattttaggtccttaatattctttctttttctctctctctcgtttctctcttctctctcctctcctctcctctctcttctcctcttctctctctctccctctctctcctttgtccagagtaaggataaaattctttctactaaagcactggttctcaaactttttggtctcagaccccactcttagaaattgaggatctcaaagagctttgcttatattttgttcttttgatacttaccatactagaaattaaagcgaatacatttttaaaataaatacacatgcacacattacattagccatgggagcaataatgtcaccacacacacttcatgaagcctctggaaaactctacagtatacttgtgagagaatgagagtgaaagggacaaataacatctgtgtagcagtattatgaaaatagcttgacctcgtggacttcctcagagggttggtccctggatcacactttgagaaccatacttgtcctgaagtattggagttcatgtctaacttcttcccagggcattatgtacagtgctttttattactgtggggagagggcagtgctaaataaattaatcactactgatagtcttcatggctcagggttttcctgcggccctaggagtagtacataaaatggaacactaccctgggcatatcagagcagcagccctggggcagggatggagactggggggtggaactagtcatacactcaggcagaggggatggggcttctctgggggagggaaaagggaactgtgccacagccaggagagaaaagtttatggggaagttaagagtgagatgggaggacaggaataggctgtccattctcagcacgctggaagcaagggaaatgggccacctactagtccttccctctttttttttttttgttgagacagggtctcgcactgtcacctgggctggagtgcaatggcgcgatctcagcacactgcaacctctgcctcccgggttcataggattctcctgcctcagcctcccaagtagctgggattacaggtgcacaccaccacacccggctaattttttgtatttttagtagtgatagggtttcactatgttggccagactggtctcgaactcctgacctcaggtgaatctgcctgcgtcccaaagtgctgggattacaggcatgagccattgtgcccggctattccttccctcttcacccaagttgggggctcggaggggctgcagagttggcacttgtggacatcttcagaccctggcattactgaaggagctgttgccctgtgtgcgtcctatagcatttctgtccctatgtctcaatactgtatttttatctgtgtgtgcacgcactctgtgtgtgtgagagaatgtgtgtgtgtgtgtgtgtgagagagagagagagagaggtgtgtgtgtgtgtgtgtgtgtgtgtgtcagggttctccgtttgtgtctgttttagtccagggtagccttttgtgtgtgcctttatgccaagtgctccagatggtgatttacaggggtaaaatgacccctggtggccaaatcagagaactgacccagattcctcagggatagccatgaaatctgggcctttctccatctgggtggagattggagcctggagcccggcacttacctccagccgctctggaagaggcctggtgattagcacctgctccatctctcttcatcttcagggttcaagacctgtgcccttcctgtcctgagagcactggcagcgccaaacctcgtagtccaaaatcttagcactttgccctattcaaacagaatcaaacacaatttttaaagattacttgagtacttttataggcaggtacgtgagttccaaagtaattacaactcacggcatgtatcacttttcaacatactatataatttatttattctaatttttatagtttatcatctccgccaccccgtcctatatcctaggtagaatgtaagttctgtgggggcatggatttttgcttgattctctgatgatccccagcatctaaaacagtgcctggcacagagaaagtgctcagtaaatatttgttgaatgaatgaacagtcagatcttgctgtgaagtagtttacaatctagtgagaaccatagaacaagtaaacaaaaactataatgccaggcagaaaacacaagaatgcagggtaaggtgctggcagttggtttagtgggcaatgggaagcccacggaggctcctgagtgaggttttgctcacactgacaaactgtgtggaataaactgtaggaaaatgatggggggggaaagtctaaagaaacgaaagactggtcagggggccattacaatagcccaggacaagtgtggccatggcctgtggaagagctagatggcaatacattgtctctgatgtgaaatctctggtgtcaaagccctggtggactatttccccccattcagatatccaaaggctttccatcaagagaacagagaggcaagaatagattaggccattttcatagggttccccaagactaagagagcaatatgaagtccagagccctcaccccatgccctgaagctgctctatttaaggtctatgaaaatccaaagatagagaaggggaaaatcttagacagacgggaatgagcattagcagtttttgttgttgttgttgtttttgaaatggagtttcactcttgttgcccagactggagtgcagttggtggtctctgctcactgcaacctccgcctcccaggttccagctattctcctgcctcagcctcctgagtagctgggattacaggcgcccgccaccatgcccggctaatttttgtatttttagtagagacagggtttcaccatgttgaccaggctggtcttgaactcctgatctcaggtgatccacccacctcggcctcccaaagtgctgggattacaggcgtgagccactgcacccggccttttagcaggtttaaaaaatactcttctgtatgccaagatttcaagttagcgcttaagatgcattatcttctttattatattaaataatataatctgagttggagatgatgttcatcccttttacagatgaaacaccctggagaatctgaggtcttaaggtcacacaactagaaagtggctcagtctgtaatttggctcccaaactcctgctttttgcagtatacctctccttcctgggactttctttcctgttacataccaccccgggtttccttccttctcctcccctcctcatgtagccacctctttcaactgcctggcttgccttgaatctgctgcatcatcttggtcctcctcttcccagttcttcctccatgcccctaatccacttgccctacagcacacccgccccttccctctccgtttgtctcagccccctgtttattgaacaccatgtggctgtaggggttggggaggttgagagctggctcactcaaggttctaattgtgttgggccctaaaatacaccacatcgagggcccacacacaggcagaatgccttaagacttcaggcagttggccatgactcccctcccccagcctgtgatgtaccctacatctccaaggcagcactcctgattgtgtacactgagcagggaccatcccttggttcacccttcctcaaagtctgtctcctcggtaggatggtccctccacatggtgagaggagctgggaagagtaacaatcattattattatttttttttttttgagatcgagtcttgctctgtcacccaggctggagtgcagtggcacgatctcggctcactgcaacttctgcctcccaagttcaagtgattctcctgcctcagcctcccgagtagctgggactacaggcacgtgccaccacacccagctgattgtttttatttttagtacagacagggtttcaccaggttagccaggatggtctccgtctcctgacctcatgatccgcccacctcggcctcccaaaatgctgggattacaggcatgagccaccgctcctggccttaatttttttttttttttttttttttgagacaaggtcttgctctgtcatccatgctggagtgcagtggtgccatctcggctcactgcaacctccccctcccagattcaagtgattctcctgcctcagcctccttagtagctggaattacaggcgtgcgtcaccacgcccagctaattttcgtatttttagtagagacggggttttaccatgttggccatgctggttttgaactcctggcctcatgtgatgtgcctgactctgcctcccagagtgctgggattacaggtgtgagctaccacacccggccacaatcattaatcttaaaacaaatttaggagagccagggcagaggtaagggatatcaaaggagggcagagattcttccttcttggtcctcaaccatcctgaagatggaattccctcgaggctgccacctggagtcccatggaagaaacggggaacggaaggttaatctcacacaggaaggccctggacaagttggggtaattctcaccatgttgtccttgccagaggagcacggaaagtcctggaaggtgaactttctcactcagggtttggggaatcccaaaggctccagaactttggaatcaaacaaatctgggcattaatttcaactctctcacttcttggcaatgtggcttcaacaaatttcttgacctctctgagcctctgttttctcccatttctctgtgaaatggggctcataatatccacttattgggttattgtgagggtcaaggagcccacctttgaaaggtactctagatgccccataagtgggagctccttctttccaacaagagcatggggaggcgaggccattgatcaactctgccagtgatgcccaaggggagtgtttcccgaagacctgaagggctctttcctcacccagacagagctctgccagcaatcagacgtaggaccacgggaggtggtgagcaaggcaggctgggcaggtttccacggtgctaggtcaagcaggcagtctttaggggcagcgactggcctgttgccctctgggggcactctctccccactaggcccatgtccatcccacagaccaaggaggaggtaggaaagtgcaagacagggggaagctggctggagaaccaagcaatggagaaagggcaagggaggaggctggaggggaagcgagggcccaggcaggcacggggtggggctgggagaggggcccagggcaggagggcgggagaaagcctgggagggaaagcgccgaccagggagggaggagggacagggagggaggcctgcggcgctgacacagcctcgatgtgtggaactggctggggtttggcccacaggtcaggcgtctggcagtattatgggatggagaggccttaggagacagggagagtattatgggctggaacagccttaggagactggggaatattatgggttggtgaggcccggctccaactggaggcgggaggaaggggtgcggggcgggaagggggggtggtggtggaagggagtattatgggctggaggcctcctgcgaccagaggcaagagtattatgggctggcaaggccttcggtggccagaggggggagcagcgggggatggcaccggctgcatgtgactgagggggggccaagttggggggggtggtgagtgggggtgggggagcttattatgggatagctctttgtacctactgcggggactgcttctccagaagatattatgggatgtcgtgtgtgggagggggagtggggctggggggattattatgggatggtggtgcagaatggggagggcctgaggagctcttctccagcccccccacctcctcaacccttactcgcctaccatcctttctaaggtcaccgtcctctctcagactccccaagaggaacacctgaaacccatctccctacacacacagactttgggcacctcaacccatcccgggcttctcccctaactagcagccacctccggggtgctgaggagaaaagtagcccctggcgaatggggagaaagccctaaagcagggtggtggtggccagtggatcacaccttccacctgcacgacggcctcctctgcaccctagccccttataccaccgtccttccccttctccctgcatcccacaaagtgggggccctggatctttctcccctcccccctcccctccatttcctctccagctccctccacagccgtaaccagtaaaacaggcggccagctattatgggatggctgctcccagcagctctgcagggagggggcggtcaccgcggaatgtctcttgtgggtggctattatgggatggccgcctctctttttttgggggggtaaggctagcgaggaggattattatgggatgtgccctgcacagctgggtggggctgtccaggagaggtgaaactctagggaggggtggggagggggagggaaggaagagggagggaaggagctggggagggtagggtgagccctggagtcggacctgaggcctggcaggagtaactggctggagaggtttctttggtgacagctgtttgaaggggcccctggggcaggctccagcgagccaaatctgaaccctggacacctgggtcctttaaacagcttgtgcgctacagggttgccctgtgagtccggggcctgcagagctgcactgcaaatgagaactgagatgttctggccgggtggcataccaaagggagtagtagtcatggatggcgatagtacccgtctcccttccatctttgtcttcctgggtttgagcctggggaccatagctcaggttgggggttgtgcacggagcactttgcttaggttggggggttgtgcacggagcactttgcttaggttggggggttgtgcacggggcgctttgctaccttgcagtcacacccaaaaaacagatagtaggttgcctcctgagatacaaacacctggcatgtcacccccaagccccacgtgatctgcatcctgtctagcctttggagtgcactgtcactgtggctttgcttccctcgttgtctcccaaaatccccttttcagacagagcaggagaacactgtggccccttggacctcttatgaacagagtttttcaggttcacacaaaacagaggtgtaaggagaggaattatagagcaaatgctaaaaactccatgaacaacccactctgagtgttgttctaggttcttctgtaccatgggatgaaaacagaactctaaggtaactggctagagaggctgccctcctgggtgcattaattaggagattatgccacccttagtctccctgggccagtcatgctagtggtttatttataatttatctgggagggtagcacggggctagaggagggaggggaagcgtagaagcataaggactacaaagcaacacaccagcacacacctccgagccctttctggaactcaagaagagaggaagggattttaactttctccttgttgtggtgttagggagaggtggggagcaagagcagcaaaggaagaagtgggtagaacctacaggaatagggacacagggtgagtagtggacaaaggatatatggataaataaaatgtggatatttttagtcacaggcaggaggctgtgactacccaaacgctctcttactggtttatatggacagatcactgtggaaatgagagtatgggtatgggcagatggagatattgcagaagggaatttgaggcccagagacaggctggatcccctggagaaatgagggtagaagagcgcacaataggcatctggcagccctctgtaggaaggagaaacttccctgaaaggaggtgtccccacatcatggtatctgaaaagagctgcctcctcaccccccattgtggaacacaagtttcattcttagtactcagagtaagtatgggagagggcttgggtaagtaaatggggcccagtcttgatgtcgagagcatttaacgagggaaactggaagccttgcagaacgggggagaatggcccgcttgccacaatgagtgcagcaagagggtgggccagggagctgaagggaaggttggaaaaagaaaacacctacttcaaaggtgacagggagcttttgacaggacctgatgtctttgatgccaaaaactccagtcctaagatgaggagagttaaatgtggaatgctagtgggtctacagagtcagccaggagctagcggaagacttgtctgcatccctggtgctctgctcaggagcagggggattgtaattccctgaggcaagctcttgccttccctgaactcatttctttgtaccagttctccagtcccttggatcctagagaaggggagagccatctggccaggccttcctctaggaaaatgagatgagaagggtaatgcagagatggcatgaggttcatcccactcactactggttagtaaagggccctttctacaaggaagtccaagtttcttttcaactcgtcccacttccataggtcttggacccatgcaaaaaaggtacatgagcagagggagacattatccttggcctggggttagggcagcaaggcagtggtgctgggacattggttttcactcaggtcctgaatctctgggagtcaggaaaagggaaaagtgacaggctgatgggttaggttttctgagggccaaagggttttaagattgggctctttcctggccaggcgcagtgctcacgcctgtaatcccagcactttgggaggccgaggcgggcggatcacctgagtttgggcgttcgagaccagcctgaccaatatggagaaaccccgtctctactaaaaatacaaaattagccgggcatggtggcacatgcctgtaatcccagctacccgggaggctgaggcaggaaaatcacttgaacctgggaggctgaggttgcagtgagccgagatcgcgccatggcactccagcctgggcaacaagagcgaaactccgtctcaaaaaaaaaaaaaaaaaaaaaaattaggctctttcctgaggtgggaagatcacttgagtccagaagttcaagatcagcctggcaacatagtgaaaccccgtctctacaataaatttaaaaattagctgggtgtggtggtgtatgcccgtggttccagctacaggtgggaggctgaggtgggatgatcacttgagcccaggaggttgaggttgcagtgagctgtgattgcgccactgagaccctgtctctcaaaaaaacaaaaaacaaaacaaaaaaaaattcggttatttcagcttctaggattgggtccatagggtggctggagggtatgcataataagggaaggagatggtatacgctggagggctaccttggggcataattcaatgtagaaggtttcctggactgctgacttctttttttttttttttttttctgaggcaaagtcttgctctgttgcccaggctggagtgcagtggcacgatctctgctcactgcaacctccgccccttgggttcaagcaattctcctgcctcagcctcccgagtagttgggattacaggcacctgccacctcgcccggctaattgtttgtatttttagtagagacgaggtttcaccatgttggccaggctggtctcgaactcctggcctcgtgatacgcctgcctcggcctcctgagtagctgggactacaggcgcctgccaccacgcccggctaattttttgcatttttaaaagagacgagatttcaccgtgttagccaggatggtctcaatctcctgacctcgtgatccgcctgcctcggcctcccaaagtgctgggat

SEQ ID NO: 701 - DNA, 263 bp, Homo sapiens
tgggaggggcagaccaggaacagctgactaccatgcatggggagagctctgataaacctgcgcactgttgcggaggcacaagtgagggtaccacatccgccttgtgttgcgggggcggttagggaaggctttgcagagtcctgagaaaatactaggcttgccagttggagaacgggaggcagggcattccaagttgaagaaacaccacatacaaaggcagagtcctgaaaacataaggtatgtccacaattagtattagtttg

SEQ ID NO: 702 - DNA, 485 bp, Homo sapiens
tagggatggctaaccaggggtgaagggcacataaataacatccacttgtaatccttaatctgctttcacactcactcctctcttccactttgtttcctgtaaagtataaatttcttagtctcatcatatagaataacccagaatgatatgatttcactaccatggatttatagaaattatttcttcttccacatttttgttgctgaatcaactgtcttgtgtcatctctgacactgttattctcattattaaaaaaaattctattaatggtttcatatagtcttttctctaaagataatattaactaagtgccttttatattctaaggtctttatttacataatcttgaatgaagccctggaatcttgcagggaccttcattatcttacttcattctgtggatttttagtgacactttcattttctaggccctcctttagacattttaggcagtgagcaaaattgacaagtagaaaaaaaaagaa

SEQ ID NO: 703 - DNA, 486 bp, Homo sapiens
tagggatggctaaccaggggtgaagggcacataaataacatccacttgtaatccttaatctgctttcacactcactcctctcttccactttgtttcctgtaaagtataaatttcttagtctcatcatatagaataacccagaatgatatgatttcactaccatggatttatagaaattatttcttcttccacatttttgttgctgaatcaactgtcttgtgtcatctctgacactgttattctcattattaaaaaaaattctattaatggtttcatatagtcttttctctaaagataatattaactaagtgccttttatattctaaggtctttatttacataatcttgaatgaagccctggaatcttgcagggaccttcattatcttacttcattctgtggatttttagtgacacttccattttctaggccctcctttagacattttaggcagtgagcaaaattgacaagtagaaaaaaaaaagaa

SEQ ID NO: 704 - DNA, 120 bp, Homo sapiens
ctcctgagtagctgagattacaggcatgcgccaccacgcccggctaattttatatttttagtagagatggggtttctccatgttggtcaggctggtctcgaactcccgacctcaggtgat

SEQ ID NO: 705 - DNA, 120 bp, Homo sapiens; identical to SEQ ID NO: 704

SEQ ID NO: 706 - DNA, 657 bp, Homo sapiens
taactttttataggtataatttgttatttttaataatgcttataaaagtttttttaaaaagtaagctgtattgtagaaatcatcaaataccaactagaattatattttaatattttatagattttactcatagagtaaaaattacattgttagatatgtaaggggtggtaacaccttttaaaaatcttggttgtccttgtttgttctgtagtttatgaaaaacagagattctaaagattgcacctatgcatgaaatctgatttgctcttttgtgcagtataagagtatggctgatttctttcaattctgagaaccttacataggagaccccaacctctacataggttacaagtgaatagactctgatttccgttgattttatttcatgtaaaactataaccttcacaactacacatcaatctcaaacttctttgaatggctcactacttaaaagtcatttttccctaaatgatatgtatagatataagtgatctgaaaaatattttcaagattttattgtccttcttacctatatgcagaattgacatatatgcctatataaaagtggaaaatctgtatatgatgaaacaccatacgtagttaaaatacaagagccagattgagaaagaatatctgcagattgggaatagaataatt

SEQ ID NO: 707 - DNA, 658 bp, Homo sapiens
cttgtaagcttattgaactatttcaagtagaaatagaaaatatgttgtatgtgttttgctgctctgcatcataagcattttcttataatctttcccagtgttgtcactgatgcaaatggaataattgattcataacattctttcttattaagttgggctatgacttcagaattattttttaaaaatgtgctcaaagaggaaatagcctaagaaaattttattttttaagttatgttttgatttctgtttacttttttatatgtttactttttattgaattttttaatgttaaaaaatttaatttttaagttatattttgatttttgttgttttttaaccatatgtttactttttattgaatttattaatattgcaaagttcttgcactgccaaaccatgcctaagaattcaaagaaagaaatggtacagtagacggcctcattcacccatcatacagtatcttaaaacttgattcatgtacattttgatattttcatagtcttttaagaagttataacgagttggaatttaaatctgctgcaggggctgagcacagtggctcatggctataatcccagcaccttgggaggctgaggctggaggattgcttgagcccaggagttgagacctgggtgacatagtgagaccctatctttcc

SEQ ID NO: 708 - DNA, 422 bp, Homo sapiens
attaggaccaggcagtcagtcatctgttctgggagacaaaccagtccaggacaagtagcgtttggacaatatgccaaatcctgtcacatcacattgttgctctaaaatgggtggatggattgggttgatggcatacgctaagctccatgagggcagggattgtggctggactaagtctagtggcaattaaatagagctcaaattaaatagagcttttgctttgaggtctgaatccatctccatgatttgtcactagactagtgacaaacagtggctgggatagcatatgttgtttagacagcttttgcttgttctaaaagtttgaatgtgaattggggtttgcaactcaaaatttgtgtttaatatttgcaccttatgtttaatgaacataaagtttgtgtaggccatgtgaaaatcagaga

SEQ ID NO: 709 - DNA, 165 bp, Homo sapiens
gggggggttggtttaacaaaaaaaaaaaaaaaaaaaaaaaaaaaaaaaaaaaaaaaaaaaaaaaaaaaaaaaaaaaaaaaaaaaaaaaaaaaaaaaaaaaaaaaaaaaaaaaaaaaaaaaaaaaaaaaaaaaaaaaaaaaaaaaaaaaaaaaaaaaaaaataaaa

SEQ ID NO: 710 - DNA, 195 bp, Homo sapiens
  SITE (3): n equals a,t,g, or c
  SITE (30): n equals a,t,g, or c
  SITE (32): n equals a,t,g, or c
  SITE (37): n equals a,t,g, or c
gcncccaatacgcaaaccgcctctccccgngngttgnccaattcattaatgcagctggcacgacaggtttcccgactggaaagcgggcagtgagcgcaacgcaattaatgtgagttagctcactcattaggcaccccaggctttacactttatgcttccggctcgtatgttgtgtggaattgtgaacggataaca

SEQ ID NO: 711 - DNA, 802 bp, Homo sapiens
aaaagccacaattcacaaggaggatatactatttatgagtgttagagcttcagttatctggtttgtcaactttaagtgatattctttggctcctgcctatcccctgtacaacaaagagctctttctactttcctctttctctctccctcctttttcattgtttccgttgtgttacttctgccttgtcaaagcacataacatttgcataacaaattatgcaaggaaaaatgaatagaaacctagaaataacagagaaatttaaaacacctctctctcatccaagactgaagttaagaagacaaaaaatacatataacgatataagtgatctgagtaacagtatctataaagtagatctaatgaatatatgttgaactttctaccttgataatagagaatattactctagggcaagcgtgatggcccacacctgtaatcccagcactttgggaggctgaggcaggtggatcgcttgagctcagaagttcaagaccagcttgggcaacatggtgaaaccccatctctacaaaaattagccaggcatggtggcaggagcctgtagtccctagaaatttatgactcttctaggaatcaagattgttgtcccacagcagcctcacacacctggcatagcagtgattaaactcattgggagctatctcaaaaataattgtgagtgaggcttttggtacatagagtagactccaatcagacacataaagcccacagtacattttaggaagctatactaatggcattaacctggattaaaagggactaaatgttaaaagaccctggacccc

SEQ ID NO: 712 - DNA, 1232 bp, Homo sapiens
cttgcagtccacttgctgaagaagttgtgtcatttctctggaagaatttccaaaattctggatttcttttttattttggagtatttcatcagctgaaaagtgattcttactttgagttttcttcctatatttgtatagtgagttcctttttccttcctctttatccctcctgttttactttatacctctctattccttgctcaaattattgcaaaagcctctatagaaagtcctctgtgatctgactcctgcagactcttccagatttttctgcccaaggcctttactgagctcaggactccagctaaatcaaaatactcatgttctcacccagagtgacaaaatcctgcagataggtttaagacctagtggatcagagcagtagctactgggaagttaaaaggaaggggcttagaaaatgaatgggaccaaaggcatcacttctgatggagatgaagccatcttgaaagtgagtggtgtcctttggaggcatggtggatgaaaggcgcaaaggaagcaagaggttaaagataatggcccattagatacaacagcaagcccaagattccgaagaagacagacaactccccctagtaccacctagacattactttttaaagacattttacattattgtccagcagaaaaaggctgtcttggaccatgaaacagtaaactgtaactaaacacttcaacatgaatttgaaaataaataattgtggatataaaagaacaccagagatcagaaattctaaaactcagaataaaaatgaaaaagctacaagcatatatgagaagagaactgactgaacttgggaaataatttgaacaaaaagataaatcttcacagatatgaatactaaattatatcttaatgaaaatagatatggtcacaagtacattaaggcacgtagaaggtaggagtaagaaaagctaagagaagcaaaacaaacaaagcaatattaaaggaagagccaaaaagacccagaaataaaatgacagataaagaagattgtcaaagaaaagatgatacaggtaagattggaactcatgaagacaaaagataagacagtggcatagagttaatatttaaaattcaaatattaaaactcaaataaaccccaaagaacttttggaaaacaaaagaaaaccttaaactttatcttgaaagggtctatcttgttacttagaatattgaatcagaatgattagctctgagacatagcctacca

SEQ ID NO: 713 - DNA, 117 bp, Homo sapiens
ggaggctgaggcaggagaatcgcttgaacccgggaggttgaggttgcagcgagctgagatctcgccactgcactccagcttgggcaacagagtgagacttcatctcaaaaaaaaaaa

SEQ ID NO: 714 - DNA, 447 bp, Homo sapiens
cttatcatttgtattaaaatatggtttaatgtaaagagttgcctttctccattcccccctcccctcccctcccctcctctcccctcctctcttgcccccaattaaaaaatagcacatccctaatgtgggaaacagtaagaaagcatagattacattttaggcagggcacagtggctcacacctgtaatcccagcactttcggaggctgaggtgggtggatcacttgaggtcaggagtttgagaccagcctggccaacatggtgaaaccctgtctctactaaaagtacaaaaattagccgggcatggtggcgggtgcctgtaatcccagctacttgggaggctaaggcaggagaattgcttgaacccaggaggcagaggttgcagtgagcagagatcacgccattgcactccagcctgtgcgacagatcaagactcagtctcaaaaaa

SEQ ID NO: 715 - DNA, 533 bp, Homo sapiens
gattctcatgccacagcctcctgagtagctgggattacaggcatgtgctaccatacccagctaaattttttgtatttttagtagagataggattttgccatgttggccacgcaggtctccaaactcatggcctcaagtgatctgcccaccttggcctcccaaagtgctaggattacaggcatgagccactgtggctggcctgaagtgtgttttcactggctattaagttctaagttggtagttattttctttcaacacattaagaatgtttggttgctttctgtcttcctttctttttgttgaagtcagctaccagtcttattgaaggcaatgtattagctatattcttgctgaggataatgtgtcttttatttttccttggctaattttaagactctctgtgttacttttaaagcactttgatgtgttcagatgtggttttctttgttgctttatgtttatagagttttttgaatctagctggatgccttttagttttggaaagttctgttaccaccttttcatatattctg

SEQ ID NO: 716 - DNA, 8326 bp, Homo sapiens
gactctgctgaccttcggcatgacattgatcgccgtagaaaagaaagaagtaaagaacggggagattccaagggctccagggaatccagtggatcaagaaagcaggaaaaaactccaaaagattacaaggaatacaaatcttacaaagatgacaggtaattgttcaaactgactaagataggttttagcttctaattagcctttaataattgtcagcttaattgctttcaattttgactgtgtaatcgaatgtttaaatttaaacaattaaaattatttgttttacagcaaaaatgtatttgtcttttacacggcttatggtggatgaggacaaaaactttggaatagcaagctaacactgaaaaaaaaaatgacaaattaatgtgtcctattatccaggctacatcaggaggttggacttcaatgcagtgcatttctagaaacagtttgtgtaagaactttggttcgttatgcttgattccgcactttttcaactcataacacccagagtacaagaattttaaactgatatctagtggtttaacatgggagagatgggggggaggaaggactaaaatagcatgtgtattagtctttcaaaataatatttccttggaaactgttagcagtggtaagagttaaccacaggtatgaccttttcgggtgttgcattaaatcatgtaaatttgatcatcatagagtcaaataggaacacaaagtattatagataatctttttccttgctattcattaggtaaatggtggattttgtttgtgttattaaatttatggctgttatttgtaatgtcatatgctttttatttgctataatggtactatagcccaaactataccaactattttcacccagggtgtacaaactgcagtcattttgaaacttggccttaagaacatccttactttttcctactcttctcttcctttcattaaagtaataaaagacataacttaatttaaaaatactaaagaactgaaccttattcttgacctttacagactactattttctaactggcaggccctagcatgtttttcattattgatgtaaaacacatattgaaggagaatggaaacagactgtgtcaaagtttaacacccaattattttatttacataattttattaggggatagtgttgttgacttgaaaaatatctcttctgttgtaagattcagcagggtctttatctttttaaaagtatcacattttttgttttctttattttgcagtaaacataaaagagagcaagatcattctcgatcttcatcctcttcagcatcaccttcttctcccagttctcgagaagaaaaggagagtaagaaggaaagagaagaagaatttaaaactcaccatgaaatgaaagaatactcaggctttgcaggagttagccgaccacgaggaacctttgtaagtgaaaaaattatctttgattgtttggtaggagtttatcttagagtactgtacataaggaaggtcatatacatgatttagagattgttatgtgtgtcattattcctaaagtcagagatagtattgaaacatgaagtggtgtttgaagtgctgtcttcatttagaaatgccattttgaggtctagaagcatctgtataaactaggtacttttcttgacttcgagatcaataactgtacctagtccttaaagaccaagagtcaaggaaagttactgatttgtaataacatttctttaatcacttagtttttgaaaaggtaccttaacgccttaataaaacccctgtatgttcatctctgtattacagttacattcattttgcctgctttcttcaaatccttgcttatatgggtatcaatcatagaaatcatataaatatttcacatagcatatacattatccccatgtttctgtaagtcgttataattattaatataatgacttccatggtagtgcatcttcttgcctgtttaatttcaagattcacactcctaccttgagcgagtatctagttgggttttggtggagttcatttattagataatttgggaaagagaagagctttgcttgtatggtgataggtatggctgaatacttggggcttctatgataattcaaagaaattagacaacttttgactagtaaaaaggaaaaacaacttgattatttaaaaatattagttcagtccatgaaagtacagtattctaacacttaggttgatcatttcttaacctactcaacttttagttggcagaaattttttgcctatgatataaaatggccatccttttcatcctcaatggccatgagatttagataggaaattagggcatatgttttttgttactgcagtaaaattagaatttgcatgtaactaaataccttttgattgcatcactaaacaactttgttaatgttaatcagtttcgaattagaggcagaggaagagccagaggagtttttgctgggacaaatactggtccaaacaactcaaatactacttttcaaaagagaccgaaggaagaggaatgggatccagaatataccccaaagagcaagaagtacttcttggtgggtgttagacatctgtgtttatttggtttgcattaattttcgaagcatactaggtgaataaatttgagtacagataaccactactataagaagattcaccgttatgtgggaaaccttttttaaaataattacccagacgatttgaaattttgaaaaatgtgggtccctttagtcctgttcatactttcttgatattaaacataggctgatcagggtaagcaaaaaatatacctgatttgttacccacattcagagaaaaacattatattatagttgagcttaatgtttgttttatatctgtctataagacagtgacagttgtagaaacttcacattaagatgtaccttccattatcatagctatttgtttaaatgaaaaggagaataattttttcaaagtacgtgtaattaagaattttagggaggctgtcaactttcattggagaaaaaagatgatgaaaaattacattacagaaaagttgctgctagatacactaatttggtgcttcctgtggtagaggtgcttttccctctgaaatagtttttcaaggatgaagctagaggtggtaggtcctgaaggattctctagataaggatgggcattttctgctgtttggcatggggaaaagggtctctcctgcattatagaggtggacaagaatataccgaaactattaccagaagtattcatttttttgtcatggcttttcagagaatttatgcttcagagactagttctgaaaactagttccttccatggaggaagattgtattggacttgaggaattgttgactttttcagttggctttttatgagtatatttgaataaacctgaatgtccatgacatacctacttagaggttatagctatagtttgaagtggatctctattttgtctggaaaaactatatatgtttcaaaaatatatttccatttgcctcttttttggcatgttaatgaccaagaaccaaaaaaaaaaagttatagagtgcgttatgcataatgttttctcagtttatgcttcttgagtgtcttgaattgacattctggaaagtaaaaggcatttgatgtatagaaaaatttgaaagatccatctacttggttcaagaatttatgtattaacagacatgtttatgctaggtagtaaggatggaaagacaagtaggatgtgattctaatttttgacttagagactgctagtagtagagaaacaaacattctaaatatatatggtggcttttcacttttcccaaagaagaaataggtggatttctgcaaaggagacagtgattaggagagacttttgtagaggaacttgaccttaatcttgaggttaagaggtaggcaagtgtactgcacatagcagaaggagtgaaacagcatggtatagataactctagtactcagatggctagatggttggtataagtgtgggaaaattgagtacaaggagtcagtgtgaaaggtcttaatacttttaagaaaatagagttttaagcagagtttacaaaaatcatgggtgttaaaagttaagcaatttgagagaatatagtgtctgaactaaggggctagatttgagaaagtaacatttatggggacttgaattcagggagttggtagtgagaggaaggaatctaaatctgtaggaaagaagctcctttcaaaagattaagttctgttctgaacaggttgaatttgaagtgcctgggagaaatggagctgtccagtggatagttggtaattcagatttagagaaacaaaaaaatctaagtgctctaattttataggtcaccattaaagctgtgttaagatcacagaagagacgagataaagaccaacatttcaaaggtggggtgaaaagtgagagagagtaaaaatgccagagaagtagaccaggtatgatagataggtcagaaggttaagagggaatgaggggtgaacaaatagatagtaattgtttaacacttttaacaatttacaaatattaaatttaggccgtttttctatggcattctcttgagtctgctaacccttaacaagtacatactcattttgggttggcgtttacttaggcagtagtttcattaagaactgtcttattttaagaatttagccacttataagtagcagtaatatttttacatgttgcttttctgggttatatttaaaaatcttggtctctataaaacataaacattgatttgccacagactgatgatgctcactagaatatcaagcaaaattacacactttttccttataaattagttcccaaagttaattattttggtttttacttatgagccattgaaatggcaactttggttttcacatgaatagttaaatttaaaagattttgtatcttatatgtaaaggaatgttgagggaaaagaaggaaaaatatgattcagaagaaaagtctagaactagacattcattcccttaggttctttcagaacaattaaccagtttaaaagagtttgcacatttggatgaaacattaatacttagtaactaacaggccaggcacggtggctcacacctgtaatcccagcactttgggaggctgagacaggtggatcatgaggtcaggagttcaagaacagcctggccaacatgttgaaaccctgtctctacaaaaaaaacgaaaattagctgagcgtggtggtgcgtgcctgtagtcccaactactcgggaggctgaggcaggagaatcgcttgaacccaagtggtggaggttgcagtgagccaaggttgcgccattatactccagcctgtgtgacagagtgagaatctgtctcaaacaaacaaaaaagcttagtaataatagataacatttgttaagcatcatgtactatgctaggtgctgttctgagtgttctgtatgtatgaatacttaaaaaaggcttttgagttggggccattattctatttttgtggatggaaaaaactgaggtacaaaggtggagtagcttaagcagagttatgtggctagtgcaatggggtcaggatttatgcattgggctccagagtcagggttctgaaagtcttgtttgtactatttgttgtccaatactgagttatagtaatctttgttgcattctttttgaattttcctatctctaagctttgttttatgcaaaggtgtggtaatgttttcaataataaaaattccaggaaagatactagttttagttagaacctgaaattctatggaggggtgagtgtgaagagttggagcaagtgggaaagtactgaagtaggcagattctcagtgttgagttgctgtcttcaaaggaagagaaaatcgttggtggggaagggggttcaggattggagttttggttattattcctttgaaacgtgatccttgtatggagaagagaagatgattcagaaggtcttggtttctaatacagactcctttgttaacatgttcttagctgtgtataaatatctaacttctggcccttttaaatctgagataattaaaaattaaacattttaataatgagactgaaatcttcgatataaaacttgagtattaagaatatgtttagcatcaaaaatctcaattaagtagctgccaggatgccctacgaaaggcacagtttaattgtttaggtgctgttgtgtttaccaagtttcagatgattgtatattaaaagcaatggctagtttaaccctagtgtctagctttgctcttggcttttctatttctgctaactcttagctacctggtgtggtaatcatatactgccaccaagatatctgggaaatgtgttttatgggtgatggtcacaaggggtagaagaaagggctagctctgtgaccttgggcaagttacttaatttctcagtgcctcagtttgtttatttctaaagtgagggcagtaatactatcttagagggttgttgtgaggattagttgaataaatacatgtgaagtgttcagaacagggccagatccatattacacactatagaaacatcatttttgccaccatttattgagtgcttgcttgtcagacactgggccgggcacttcctgctgatctgtgttccctcaaggcacacattattaaaatgaagtgaattctagagaggttgcccaaagtcacacagtttctgataagatttaaacccatgcttctactccaaaacctcttcccagaatccatggtgtattgtgtaaaaatcataaaaaaacacagcctctggagttgggtatgttaatgtgataagggagcatgaaattatgtagtggagtgggcattatttttagaggcagactattttaaagtagtttattttgggtttgtaataaactctgccgtatttaaatttacacttttgatagttccaaaattcattcattatagagtcatgtacacctctacctagtaatctttcagtggtttggtaaagatagattattagcagttggtaagttctctttcatatggtctgttagttacccatataattgaacttttcaagtcatgaagggggttaatcagttaaatgaatatatccaaaggcacagtcttatgttttggaaaaaaaatactcatatgccatattacgtaaaaaaaagttttagtggcttttggatggttgctcactactggtactctatagattacacaacattttgtttgcattataccccttttctaataaaggggcattttgctttatttcccatttttgtgggtgacaaagttaataagttagctgttaattaaattacatacaggactcccttggccttttgtatgaatataatacccatctctactcatctacaaagtcaagtacttttcagttttgcagattgttttgcttaatagaacaatttcataatttggggatcatctgtatttgaatacaattaatggttaaagctgggatgtgataactgcagtactttagattgatgaagaactgagtgagatgttaattctagggaccgtgtcatgatttaccattgaaattctctagcccagaacatcgatatgtactgtacattgatctagatttcaatctcagtagatttaaaatctacttttatatgtaaagtataaaattcataccaccagtttcattttagtgaatgttataatattttaatgatatttttatgactttctgctgcatctttatgactaaggtaattttgggaaaaacttaattttatctcattgcatttggtgtaataataagtggacttggattgacataataaaaaaacaaaactcaggattctaaaaatcagtggtaatttagcagttgagatcttccaaatgattgtctgggtaaccttcagtgcttgggttgctaagtagtaagatgtagttattctcttgatgatggaatgtatttttgttgaaaaattcagttttactggttttgttttattgtgttttagaatattaccaatctcatatacccaatcttcagaagattaatactgtgatttatgattggagaaatgatcatctttacaagaaacatttcattgacaattgtttttaacctttctgtagcatgacgacagagatgatggtgtggattattgggccaaaagaggaagaggtcgtggtacttttcaacgtggcagagggcgctttaacttcaaaaaatcaggtagcagtcctaaatggactcatgacaaataccaaggggatgggattgttgaagatgaagaagagaccatggaaaataatgaagaaaagaaggacagacgcaaggaagaaaagg

SEQ ID NO: 717 - DNA, 21732 bp, Homo sapiens
aatagaaggcactctaggagtcctagacgaggtcgttcacgttccaggagtccaaaaagaagatccgtttcttctcaaagatccagaagcagatctcgccggtcatatagatcttctaggtctccaagatcatcctcttctcgttcttcatccccatatagcaaatctcctgtttctaaaagacgagggtctcaggaaaaacaaaccaaaaaagctgaaggggaaccccaagaagagagtccgttgaaaagtaaatcacaggaggaaccgaaagatacatttgaacatgacccatctgagtctatcgatgaatttaataagtcatcagccacatccggtgatatttggcctggcctttcagcttatgataatagtcctagatcaccccatagtccttcacctattgctacaccacctagtcagagttcatcttgctctgatgctcccatgctcagtacagttcactctgcaaaaaatactccttctcagcattcacattccattcagcatagtcctgaaaggtctgggtctggttctgttggaaatggatctagtcgatacagtccttctcagaatagtccaattcatcacatcccttcacgaagaagtcctgcaaagacaatcgcaccacagaatgctccaagagatgagtctaggggccgttcctcgttttatcctgatggtggagatcaggaaactgcaaagactgggaagttcttaaaaaggtaaaaactaaaatacagaatctagattataatattgtttttgttctttgaattctgtttggaattataaacgtaaaattgtgatatgtatttaactagcggtttttactcttgacttccttcattttaagataattccaaattgtttttactcttatctggtgaactttggaagctaagtgttttaataaaaattaatttatccagctactcaggaggctgaggcgggaggatctcttgagcccaggagttcaaggctgtggtgagctatgattgcgcctactgcactccagcctgggcgatagagcaagaccctgtctctttaaaaagaattaaaaaaacctaatttctatccctcctcttaattttaccattttcggtccagaattaaaaatacagatgaggagaagttgagtagcttagagcataactaaatgatatatgttgctaataactgtaaaccttttagaaattaagtttcttaaagcattgaaggcttattttgttcttttcactattagaatgtgacctacataaataatgcagctatattgcatgttcttaggtggcataaacagtctggctgtcaatatttaatgatttcagcctgactatacaaaaggtaatggtatttctcactgactaatgacatttgaaacagatacattgtttaaattctgatttcaagtgttgctgaaagttgctaacagtgaaaattggttgcttcatgtattgtgatttgacttaaaagtgagaaaatagaggaaacatgctgtttgtggaatagcactgcacaatctagaatttatgattgaactgatcattagtttctatgaaatagtgccagaaatcattatttttctagagcaagtttatatgaactgttctgtgattttcataaagtattaaattactgcagtggtaattaaatccatttgtgtgaactcttgtttatattaatagataatatctggaattttggggataattatcaatagaattctaacaatgtattatctattagtggttcttagtttcaaaaattaaatttaggcaatctctagaagttcgtgttagtgcagaattgtggattgtgactaaataggacaggtttttgtgattggctttgtgttttaaacttcagaagtcaaatgtaaatttattttaaaagtcagtacataagttctatatggatgctttcaatgatttttaaaagtggaatctgaaaaagcacttttcaatagggttattttctctcttgctggtcctgagggattgggcaacacatttaaatatggaagcgatctacagtgaatgcaatccagagttactatcctcttctttgcttattcgcaggttcacagatgaagagtctagagtattcctgcttgataggggtaataccagggataaagaggcttcaaaagagaaaggatcagagaaagggagggcagagggagaatgggaagatcaggaagctctagattacttcagtgataaagagtctggaaaacaaaagtttaatgattcagaaggggatgacacagaggagacagaggattatagacagttcaggaagtcagtcctcgcagatcagggtaaaagttttgctactgcatctcaccggaatactgaggaggaaggactcaagtacaagtccaaagtttcactgaaaggcaatagagaaagtgatggatttagagaagaaaaaaattataaacttaaagagactggatatgtagtggaaaggcctagcactacaaaagataagcacaaagaagaagacaaaaattctgaaagaataacagtaaagaaagaaactcagtcacctgagcaggtaaagtctgaaaagctcaaagacctctttgattacagtccccctctacacaagaatctggatgcacgagaaaagtctaccttcagagaggaaagcccacttaggatcaaaatgatagcgagtgattctcaccgtcctgaagtcaaactcaaaatggcacctgttcctcttgatgattctaacaggtaattccatattgatgcccagtaaataatctgtgggcagtcagtattccagttaattatcttaaactttctgaacataccatttttatatttaaaccaatggtatattttgtgtgtgtgtgtgttatcaatatgttccagacctgcttccttgactaaagacaggctgcttgctagtacacttgtccattctgtcaagaaggagcaagaattccgatccatctttgaccacattaagttgccacaggccagcaaaagcacttcagagtcatttattcaacacattgtgtccttggttcatcatgttaaaggtatgcttagtatgtttagtatcgtgaattaaatttctcttgcatgcaaataaaaaaatgtgtaattatgcttaataattcatgtaccccagggctagcaaatatacatccaatattattaaaacttggaaaagtagtttcatagaagagagtccctagtcttgctagcattgaaacttatgaagatagttaataaaaagtaattgaaatgctggagaaaccatatgctaaaaatctgtatcatggtagaacatgatgtagatttgttgaatgctaaaagtgttttttaagtatgtcattgtaatgtacttgaagtgcagaaggcttacagatagtctttcattgcatgcctatggcttgtgataatcttggcatagatttataacaaagtcagacagtattgttattgaatatttctaagaatttcttttcaacttttaaagaaatctgaaatggtggaaaaacactttttttgcgcttaattttttatacataaaaatcttaaaatgataaaacaagaaaatttatcaggatttttaaaggaaaaacgttcaagaaatttagaagtatattatataaatactgattacatgaatagtgactaattaggataatgatgacacttctttaggtcctaaagataaggttgtttatttcaactaaagtaatgatttttttttttaaatttttaccagtatgtaattatagttgcagagttactaataattttcaaagattttcaagtatgtcttttgggcagttaggttaagttttgtttttgttgttttgtttctgtgtttaaaaagcaacttactatgagacatattctttctcaggaacttcaaagactgttggcctttaaaattaatcccctccccgcttttaaaaaatctgtcgtttgacatgagaacagctcaatgtaatagatgaaacttgcctctagcagttctttatgcagttgatacatcagaacagtgaatagttagatgaatttcttttgggctgtaattatttaaacacggtaacaagacagttttgctatttggctctgagtaggtttgtgaaccagtttatgaccatattactgtggtacataaaatatgaaacattcttttttttttaattttttaatcttttttggcctagctccacattttacaatttattactgaattttgagatcaggttttgataaattttttcctttttcttttttctttttttttttttaaaagaactgtagtaatgtttcataattggtattgtgcaaccgatctgaacagctcttactttatatagagctgaaaatgcccagtgatgttttctttttcattgtaactaggtcctggaatatgttttgaaatggcaaaatccatgtttcaaagtaaaatagctgttgaaagatacaggcaaagttgaatcttctgtcttcctggcaaaaatggcataaaaactgagttgctagctcaaattcctgggtttcatggaattatgattgaggcactacccttgtagtggccgtttcaagttttaatgattggttatgagacatgtgctggatattgggcggtaagttgacaacagatgtatgttgacctgttaagcagatagcttgcttcataatgtgacatttcatagctcatgactttatacgtctttctattttacatttacaacatatcttgaactggttttaaaaataatcagtattgatattactagtttgaaaattgtttaaagagagacaaaacagcaatatcaaatttgctgttgggtttgccaagatgccagatttttggagtaattattgaatgttaattgatttaaaaatatttttccaatttgggtgataatattcagtgtttttataaatccatttttgttgatatggcagcatatagtcactgatgaaatttaatagttgacccaaacaagctttttagttaactccatattttcctgttttttgttttctgcaaatgattacttgaagtaatgtcattggttcatattggcaaggtattagagcatccatagattatgttcctttttgttctgaggaagtagtgtattaatgaagtggaattagagactcttgatttaatctattaattgctcttggattagatgtagtattgacagggacctgtgagcaactttcgaaacactctcctgttgaggtacaagaaattgaaagggtaggagttccttgtaacacttgattctcttttgctaggtttcttatttttattttcttttcacctgctacatgcccttctgtcacaaacaaatctctcttaaagtaaagttaactaatcggacagtatttcttctaaatcaacagagcaatacttcaagtcagctgcaatgaccctaaacgagcggttcacttcgtatcagaaagccactgaagaacatagtactcggcaaaagagccctgaaatacacaggtatgtatcctgctgaactggcatataaaaacgttgttttgataggaagacactgttaaaacaagattgtattggaagtttgtttttgtcattgatacaagtattattcctcatttatactttaaataaatatatttcaaagtcttgaaaattctataattcttgattttcagcttagttgaaactggttgttagaacttgaaatattaactcttattactttgcagtatggaattaaatagttatcaattagtttggtttttgggaggggcagtggaggcctagagttaccttcgaatttctagtgaaataaatgtgaaataaatgtttggtgagagagagagaacgaaagcatgagcattgaagtcagatagttgtgttgaaatcctgactttgtctcttcgttgcattgtgatgaacaacttaatctctggacgtaagttttttcatatacaaaatgtggataatcatgccagttttgcagggtggcagtgacagtgatattggctatgaagtatctgacttggtactttgtacacagttggtgtgattttggtgatgactgctaaagaagcactgggtagttgcagccaatactgacttagaaaggaaaggtgcagaataaaactaaaggggcactgaatatctaaaaatactgaagacaggagcaaataatcctattcatgtgtgtttgttgatgcttaaaatcatatccagtttaatcaaaacacattttttctatttttgatggctaaaataagtttgatgttttaaaggccagacttcacttctatataaaaatatctggttggagcattttaattcattctttgtgggtattttttcttaattgtgtattataaactaaattaatagtcttggtgtgctaaattagttgattgggagagaaataactgtcttaggaaaatggataatcgtgtggatgtttttgaaccaaaaagttaataatatgactaaaaatatattttattttacattaaggagaattgacatctcaccaagtaccctgaggaagcatacccgtttagcaggggaagagagagtttttaaagaagaaaatcaaaaggtatgtttttgaatgtaattttttttcgtgttaagttcagcttagttaatgatattgtaccaaatatagtttctcaaggcaaaatgtctatagatatcttctacttttaattcataactatattatggtagtgtacatactgtttcttcctggaagaaattaaggtgacactatactaagtgtcttaaatttaaaccaagagtgttttttcaaaacactaatgaaaggaaaaaaaatagtcctaagaaaagtgtaaagaatcagtgggtagacaaagggaaattataaaatcaaagatacaaattagaattttgagatgagattcattagccagagtaaatatttctcgatttgtgtgtctaaattaatatctctaggttcttcacagataacaagaagtaatccccatgctactgagcatttttgatgtggattaagaaataagcattctaagaactggtttacaaatgaacgtttggaacaaagacttgtcactcttggaatgtttggggattgggggaatgtcttttaaacatgagagaggagcctgtgaaagatattgaggggtcttggtgagaatggaattcagtggttaaggggtctccaatatactcttgacaattcaaaatgacctttgccaggtagactaatctatatcaggccataaaatgtctagtagtagaaatgtggggaaaggcagaaagggagcaactgttttgaagagattaggggacttggaagtactgcttggttccaattctggctgtcactaagtactatctacatgatatttggaaaataacctcttgaaccttgcttttctaattagaaaaatgagaatgcatctgttttgcagagttgttgaataattgggttattttgaaaataggcacgtttgttactagaagctgttatggacagtggtagtatacaagtttaatagggcatgctattaacttactagatgtggaatctagagcttacaaacaaggtttttttttgttctgttattttttttgtttttgttttgcatggggcgtattgatgttgaaagaacagattctgagtagtgaatactttttttggtttttaacttaaataatatcttgggttcaaagttgttaatttagttttcccaacagtttagtctgtcctcgtgctctgacagtgagtatcttctctcctcattacatagaccagattttgatccagaggagaaaaagtagagataattgatgaatagacaagaggatatgccattggtttttatcctcctgtctggatgaataacatgttaatatgtaattatgtatatatcgtttgtaatttacaaagtagtttcatttacattatcttgttacttgtggacttggtaatacctaggtgaataggaaggtttttttgctcttgattagatttttttctttgtgactctgggagcaaataggtgagtagttgatatcatttggagatacgtactttcagttttatgaatgcttatgaatattatagccagacttcccagagtaaatactacttattgttgaatactagcaaggatgtccacattgcttagcatcttactgatgtataatttctcttcattcctagatgcctctttccatcttcctaaattatatagtatttgaaaaagcaatggaacaagaaggaggtgaattgtgacccagttaaactaatgtccgttgcaatacctgaattgagaaagggcagtatatggcccaagatactgagtacaggattgcgaatatctttctggctttgtttctacccttgttcaaccaattggtttcattaataatattttacgtgcatgttatggaaattatagaattcttacttctgaagtttttttttttattgggttggtcagattatttgggaagagcttgatcataatgaggcttaagtaatgagaaccattatgttaggatctcttttatttaggtagaaggctacattacaactacagattataacatctgtcattgttcaactattgaaaacagcatttggaaggatgagggataataaggatgtgctgagtggaaaaaatatttgtatcatttactgtacaaaaatttattatagattgttttggataaaaacctgcaaaattctcaagataattagcttttaataatttccccagtcccactgcactttgtatacacaaatgtttagtaaaaatagtcaagtacattttttaacaaaaactaagtgatagtatcttatatgattcattattttctgatactaaaatgccagtttagaagctggcataaaatttaactctataatatgtgtatatatattttttctatttctcccctgaaatctgtattttatatctgtcttttatagggagataaaaaattaaggtgtgactctgctgaccttcggcatgacattgatcgccgtagaaaagaaagaagtaaagaacggggagattccaagggctccagggaatccagtggatcaagaaagcaggaaaaaactccaaaagattacaaggaatacaaatcttacaaagatgacaggtaattgttcaaactgactaagataggttttagcttctaattagcctttaataattgtcagcttaattgctttcaattttgactgtgtaatcgaatgtttaaatttaaacaattaaaattatttgttttacagcaaaaatgtatttgtcttttacacggcttatggtggatgaggacaaaaactttggaatagcaagctaacactgaaaaaaaaaatgacaaattaatgtgtcctattatccaggctacatcaggaggttggacttcaatgcagtgcatttctagaaacagtttgtgtaagaactttggttcgttatgcttgattccgcactttttcaactcataacacccagagtacaagaattttaaactgatatctagtggtttaacatgggagagatgggggggaggaaggactagaaatagcaatgtgtattagtctttcaaaataatatttccttggaaactgttagcagtggtaagagttaaccacaggtatgaccttttcgggtgttgcattaaatcatgtaaatttgatcatcatagagtcaaataggaacacaaagtattatagataatctttttccttgctattcattaggtaaatggtggattttgtttgtgttattaaatttatggctgttatttgtaatgtcatatgctttttatttgctataatggtactatagcccaaactataccaactattttcacccagggtgtacaaactgcagtcattttgaaacttggccttaagaacatccttactttttcctactcttctcttcctttcattaaagtaataaaagacataacttaatttaaaaatactaaagaactgaaccttattcttgacctttacagactactattttctaactggcaggccctagcatgtttttcattattgatgtaaaacacatattgaaggagaatggaaacagactgtgtcaaagtttaacacccaattattttatttacataattttattaggggatagtgttgttgacttgaaaaatatctcttctgttgtaagattcagcagggtctttatctttttaaaagtatcacattttttgttttctttattttgcagtaaacataaaagagagcaagatcattctcgatcttcatcctcttcagcatcaccttcttctcccagttctcgagaagaaaaggagagtaagaaggaaagagaagaagaatttaaaactcaccatgaaatgaaagaatactcaggctttgcaggagttagccgaccacgaggaacctttgtaagtgaaaaaattatctttgattgtttggtaggagtttatcttagagtactgtacataaggaaggtcatatacatgatttagagattgttatgtgtgtcattattcctaaagtcagagatagtattgaaacatgaagtggtgtttgaagtgctgtcttcatttagaaatgccattttgaggtctagaagcatctgtataaactaggtacttttcttgacttcgagatcaataactgtacctagtccttaaagaccaagagtcaaggaaagttactgatttgtaataacatttctttaatcacttagtttttgaaaaggtaccttaacgccttaataaaacccctgtatgttcatctctgtattacagttacattcattttgcctgctttcttcaaatccttgcttatatgggtatcaatcatagaaatcatataaatatttcacatagcatatacattatccccatgtttctgtaagtcgttataattattaatataatgacttccatggtagtgcatcttcttgcctgtttaatttcaagattcacactcctaccttgagcgagtatctagttgggttttggtggagttcatttattagataatttgggaaagagaagagctttgcttgtatggtgataggtatggctgaatacttggggcttctatgataattcaaagaaattagacaacttttgactagtaaaaaggaaaaacaacttgattatttaaaaatattagttcagtccatgaaagtacagtattctaacacttaggttgatcatttcttaacctactcaacttttagttggcagaaattttttgcctatgatataaaatggccatccttttcatcctcaatggccatgagatttagataggaaattagggcatatgttttttgttactgcagtaaaattagaatttgcatgtaactaaataccttttgattgcatcactaaacaactttgttaatgttaatcagtttcgaattagaggcagaggaagagccagaggagtttttgctgggacaaatactggtccaaacaactcaaatactacttttcaaaagagaccgaaggaagaggaatgggatccagaatataccccaaagagcaagaagtacttcttggtgggtgttagacatctgtgtttatttggtttgcattaattttcgaagcatactaggtgaataaatttgagtacagataaccactactataagaagattcaccgttatgtgggaaaccttttttaaaataattacccagacgatttgaaattttgaaaaatgtgggtccctttagtcctgttcatactttcttgatattaaacataggctgatcagggtaagcaaaaaatatacctgatttgttacccacattcagagaaaaacattatattatagttgagcttaatgtttgttttatatctgtctataagacagtgacagttgtagaaacttcacattaagatgtaccttccattatcatagctatttgtttaaatgaaaaggagaataattttttcaaagtacgtgtaattaagaattttagggaggctgtcaactttcattggagaaaaaagatgatgaaaaattacattacagaaaagttgctgctagatacactaatttggtgcttcctgtggtagaggtgcttttccctctgaaatagtttttcaaggatgaagctagaggtggtaggtcctgaaggattctctagataaggatgggcattttctgctgtttggcatggggaaaagggtctctcctgcattatagaggtggacaagaatataccgaaactattaccagaagtattcatttttttgtcatggcttttcagagaatttatgcttcagagactagttctgaaaactagttccttccatggaggaagattgtattggacttgaggaattgttgactttttcagttggctttttatgagtatatttgaataaacctgaatgtccatgacatacctacttagaggttatagctatagtttgaagtggatctctattttgtctggaaaaactatatatgtttcaaaaatatatttccatttgcctcttttttggcatgttaatgaccaagaaccaaaaaaaaaaagttacagagtgcgttatgcataatgttttctcagtttatgcttcttgagtgtcttgaattgacattctggaaagtaaaaggcatttgatgtatagaaaaatttgaaagatccatctacttggttcaagaatttatgtattaacagacatgtttatgctaggtactaaggatggaaagacaagtaggatgtgattctaatttttgacttagagactgctagtagtagagaaacaaacattctaaatatatatggtggcttttcacttttcccaaagaagaaataggtggatttctgcaaaggagacagtgattaggagagacttttgtagaggaacttgaccttaatcttgaggttaagaggtaggcaagtgtactgcacatagcagaaggagtgaaacagcatggtatagataactctagtactcagatggctagatggttggtataagtgtgggaaaattgagtacaaggagtcagtgtgaaaggtcttaatacttttaagaaaatagagttttaagcagagtttacaaaaatcatgggtgttaaaagttaagcaatttgagagaatatagtgtctgaactaaggggctagatttgagaaagtaacatttatggggacttgaattcagggagttggtagtgagaggaaggaatctaaatctgtaggaaagaagctcctttcaaaagattaagttctgttctgaacaggttgaatttgaagtgcctgggagaaatggagctgtccagtggatagttggtaattcagatttagagaaacaaaaaaatctaagtgctctaattttataggtcaccattaaagctgtgttaagatcacagaagagacgagataaagaccaacatttcaaaggtggggtgaaaagtgagagagagtaaaaatgccagagaagtagaccaggtatgatagataggtcagaaggttaagagggaatgaggggtgaacaaatagatagtaattgtttaacacttttaacaatttacaaatattaaatttaggccgtttttctatggcattctcttgagtctgctaacccttaacaagtacatactcattttgggttggcgtttacttaggcagtagtttcattaagaactgtcttattttaagaatttagccacttataagtagcagtaatatttttacatgttgcttttctgggttatatttaaaaatcttggtctctataaaacataaacattgatttgccacagactgatgatgctcactagaatatcaagcaaaattacacactttttccttataaattagttcccaaagttaattattttggtttttacttatgagccattgaaatggcaactttggttttcacatgaatagttaaatttaaaagattttgtatcttatatgtaaaggaatgttgagggaaaagaaggaaaaatatgattcagaagaaaagtctagaactagacattcattcccttaggttctttcagaacaattaaccagtttaaaagagtttgcacatttggatgaaacattaatacttagtaactaacaggccaggcacggtggctcacacctgtaatcccagcactttgggaggctgagacaggtggatcatgaggtcaggagttcaagaacagcctggccaacatgttgaaaccctgtctctacaaaaaaaacgaaaattagctgagcgtggtggtgcgtgcctgtagtcccaactactcgggaggctgaggcaggagaatcgcttgaacccaagtggtggaggttgcagtgagccaaggttgcgccattatactccagcctgtgtgacagagtgagaatctgtctcaaacaaacaaaaaagcttagtaataatagataacatttgttaagcatcatgtactatgctaggtgctgttctgagtgttctgtatgtatgaatacttaaaaaaggcttttgagttggggccattattctatttttgtggatggaaaaaactgaggtacaaaggtggagtagcttaagcagagttatgtggctagtgcaatggggtcaggatttatgcattgggctccagagtcagggttctgaaagtcttgtttgtactatttgttgtccaatactgagttatagtaatctttgttgcattctttttgaattttcctatctctaagctttgttttatgcaaaggtgtggtaatgttttcaataataaaaattccaggaaagatactagttttagttagaacctgaaattctatggaggggtgagtgtgaagagttggagcaagtgggaaagtactgaagtaggcagattctcagtgttgagttgctgtcttcaaaggaagagaaaatcgttggtggggaagggggttcaggattggagttttggttattattcctttgaaacgtgatccttgtatggagaagagaagatgattcagaaggtcttggtttctaatacagactcctttgttaacatgttcttagctgtgtataaatatctaacttctggcccttttaaatctgagataattaaaaattaaacattttaataatgagactgaaatcttcgatataaaacttgagtattaagaatatgtttagcatcaaaaatctcaattaagtagctgccaggatgccctacgaaaggcacagtttaattgtttaggtgctgttgtgtttaccaagtttcagatgattgtatattaaaagcaatggctagtttaaccctagtgtctagctttgctcttggcttttctatttctgctaactcttagctacctggtgtggtaatcatatactgccaccaagatatctgggaaatgtgttttatgggtgatggtcacaaggggtagaagaaagggctagctctgtgaccttgggcaagttacttaatttctcagtgcctcagtttgtttatttctaaagtgagggcagtaatactatcttagagggttgttgtgaggattagttgaataaatacatgtgaagtgttcagaacagggccagatccatattacacactatagaaacatcatttttgccaccatttattgagtgcttgcttgtcagacactgggccgggcacttcctgctgatctgtgttccctcaaggcacacattattaaaatgaagtgaattctagagaggttgcccaaagtcacacagtttctgataagatttaaacccatgcttctactccaaaacctcttcccagaatccatggtgtattgtgtaaaaatcataaaaaaacacagcctctggagttgggtatgttaatgtgataagggagcatgaaattatgtagtggagtgggcattatttttagtggcagactattttaaagtagtttattttgggtttgtaataaactctgccgtatttaaatttacacttttgatagttccaaaattcattcattatagagtcatgtacacctctacctagtaatctttcagtggtttggtaaagatagattattagcagttggtaagttctctttcatatggtctgttagttacccatataattgaacttttcaagtcatgaagggggttaatcagttaaatgaatatatccaaaggcacagtcttatgttttggaaaaaaaatactcatatgccatattacgtaaaaaaaagttttagtggcttttggatggttgctcactactggtactctatagattacacaacattttgtttgcattataccccttttctaataaaggggcattttgctttatttcccatttttgtgggtgacaaagttaataagttagctgttaattaaattacatacaggactcccttggccttttgtatgaatataatacccatctctactcatctacaaagtcaagtacttttcagttttgcagattgttttgcttaatagaacaatttcataatttggggatcatctgtatttgaatacaattaatggttaaagctgggatgtgataactgcagtactttagattgatgaagaactgagtgagatgttaattctagggaccgtgtcatgatttaccattgaaattctctagcccagaacatcgatatgtactgtacattgatctagatttcaatctcagtagatttaaaatctacttttatatgtaaagtataaaattcataccaccagtttcattttagtgaatgttataatattttaatgatatttttatgactttctgctgcatctttatgactaaggtaattttgggaaaaacttaattttatctcattgcatttggtgtaataataagtggacttggattgacataataaaaaaacaaaactcaggattctaaaaatcagtggtaatttagcagttgagatcttccaaatgattgtctgggtaaccttcagtgcttgggttgctaagtagtaagatgtagttattctcttgatgatggaatgtatttttgttgaaaaattcagttttactggttttgttttattgtgttttagaatattaccaatctcatatacccaatcttcagaagattaatactgtgatttatgattggagaaatgatcatctttacaagaaacatttcattgacaattgtttttaacctttctgtagcatgacgacagagatgatggtgtggattattgggccaaaagaggaagaggtcgtggtacttttcaacgtggcagagggcgctttaacttcaaaaaatcaggtagcagtcctaaatggactcatgacaaataccaaggggatgggattgttgaagatgaagaagagaccatggaaaataatgaagaaaagaaggacagacgcaaggaagaaaaggtataaaatttcaacttgtgattctgacagattttttttgatataggtttggtgggtgaattatttcatttttaggaacaattattaatatggttccttttcactctccgcatcttttgttaatctttaattttttctctctcttttaggaataataaatatgaagtaagattacaacagagcagaacttgcacccaccattttttttacctgatttttgttttcaaataagaatgtaagcattttacttaaattttactgtttgcaagtagtctatagaaattttgttttaagtcttcaaatatcttgagaaatagtagactgtatgttgaaaattgtactgaaataaagtagaaaattgttacgtaccatatttgtaactatcaacttttaaaacttttaacgtttttgttacatgcattgtaattctgctttgtctataagatatggtcaagtacagctctgtgaaagttctgattctcttccttccctgtttgtcaatgttttattctgaagtaaacgttagctctacatataaatcctggaacagaaattgtttatagagactacactaattattttaactgtatacatctgtttaatttgaacacactacatcgtagggtgactgatttttgaagtataccacagacaaaaagttgttactatggtaaactaagctagtttaacacttgagcaaatgcttaagaaggaattaaaaaaaaaaagctttgccaatagctaaaaagtacaagctattaaaaatcagattgaaaagttttgagaaaatgttatttttactgaaagcaagcagtggcctataaagaacattcttaggagccttttctatttgcgttcaaaactgtgtgttctctttctattcctatttgatagtttgagtcatggtcttagatattagctatttgtgagaggaaactggtttgtaacaatactgcaaatagaaaccccatttctactgaacatcctagttttaaacagaagaaaaactgtaatcctggggttggtatgtaggaggtctatcctgcagaataagttgatacattagtacctgatttcatatcttacatatttatttgagctgaacattagtttgtagtgtaactattagtaaaaatagagaaacacagcatactgttcattaatagtattttaaaaaaattgtttttcaaatgtcaccaataaaagttttggcaggaagcttgttgcggcattgatctaacctttttcccccccatttcagttgcagtttttgtagaatggctttttctttttcctcttaagagttctattcttcaggtagataatttttcaaatgtgaattatcttttgtgtctatattgatagctcttaaaggagtgaaaatctaaaatagtaaatttcaatgttaagtgtctgctttatgggcatatataaaagtagacacatttcatttgttaatttagttgtgtgtgtgtgttaaaaggagctaatgcttattctgttaatgtaaacttttgaagatcttaagtgtattgctctttcatcttaaacactttcgaggatttgcagtgcgtctagcacctagattacagccaggaacattggttaagaactgttggaaacaaaactaaaagcaaactcaacatatgtgatgtttatggccctcagatccttagtattgtgtgattttcccccgttaacatgtctttctaaaattgtctattaaagcagaggaaatacctgccaaaggaagtatgtattgcattaatcagggcataactaatattctcctgttcagaataatacttatttacgtgtgaaagcaacatggatgtgattcccaacacagaattttcatgacccttttattgtatacaaataaataccataacagttacttggttagacatcaaatctgtgtgcatgactatgtgcttatccacttaagacaataggtaaaaggggatctgagaaattatgtaatagggagtgggaataaaactacttaattcctgtgggcaggttatattttaagttcaaatgcattgctttaacctttggttacttttattctgttaaacagaattgaagaaagagtattataccagagtgtagtaggctagggtgattgtaagaactctgtaatagaatgtcattgtggatgttacctttttcagatccaagcatataaaaagcctgtatattttttaaaaacacatcttaactccacgctttacgatattataaaagttgaatggttcctcttggtaaggatatttgcttacaagtgctaggaaataactcactgatacctgcgttaacatactttgttttgcctagagaggggcaataaaaatgaaccaaaggatatttccagaaaggattaagaaagctgtttaagaaggccatgactctttaggtgtgtatgtgtacctttcagcatcctaggaatttttatactaaaagcaaaatgttttttccagttagtcttcttcaaggaattactattgttccttttgtcacaggtaaaatcagtgttgggaattataatttgagaaaaatattacccagtaacattgaatgtagatggctaaacgattcttactcagtgtgatgtataatgatgcaacagggacccttgtaaattgtcatacgccaataaaatgtcacaagtaataactgctgttgtttgtttacctgtgtctatttcacacatcttatttctgtggcctattttagaatatcagcgcatctgttaggaagattactggtgtggtaaggcttgataaatgctttataaactccctcaaacctttctttactgtttttttgttttgtcttgtttttgtttttgtttttgtttttgtttttgtttttgtttttcccttgtctcccctgggaaaatgggaaattttacagttggtaaatctaagccaaaattattttgaaataaaggaattctggatgtccagtttagtcctcgttttcttacgttaatctgggaccttatcacccataatatggtgattacttctctttctaaaaacatagtagctagtaaataagtaaaaagaattgtcttttcattcactttaagtaagatgtggtataattcttaccatgtgccatcctgtcagttttaacaaagcattttcacagaaatttgtgtactaagacaaactgacacattttgactcatacaaatggcaaattagtccttaaaaattctgtgagagaaataactctgtgtgtacatacatatgcatgtaaagtgttgtgtaagatcattggtagcttaattatactggataattgtaatgttatatacaaatttcttatataaaagtatgctgcattattaacatttgtttaacttttcttatttttctttttctgggtttcaactggaatcccattggtggggatgtaccttaagtttccttgtggaataatagactttcacatccagaaagagaagttcagaggcctttctcaatttacagagttgaagaggaaaggcaaatggaggaataaacttcattgtcattgggattaatttggctagactcaatctcttgagccttaaaatgagaaagtaatatccattacatgtttagagttctcaaatagttgatactattattaaatgtttcaaattttattggggtagatactaaaaattagtacactgtcctaatgaagtttaaatgaacaagttttacatttcttaggattcaggaatatatggaatctagttgtatttaattgacttgagagccacagagattgtgttgatttatgagctggactcctattgttttagaaacatgcagtaatgattaacttgtgtcaatgatggtaatgagaccaaacttgtacatttaattaagggtaccagttctttttatgttactagactataccttggcctttaaaaatgaatctcactgattaaagagaacaggcattattaggatagcattccaccacaactagaaacattcaaataatgtgtcttaattgtaatctgtatataggaaaatttttcctatggatatttttggtgttttaccacagtgaactgatttgtagcacttatgaagtgcagaaggtaatattcttgaaaatagaaaaaggttgggtgagcaggctttaatgcctttcccccaagaatatacatcgaatttttcttaatcttttggggttggccagcttccagatttcattaataatgagctctgcctttaataaaagtacatgatcatagctacactgtatgtttaggtggtgtgaaatgatttataatcacagcttgaactgtgtttgcttggtactgtcatagtgattacaaatttcatggaatgcgaagagcaacaataaataaaaaataccactcaccctccagaa

SEQ ID NO: 718 - DNA, 349 bp, Homo sapiens
aaaaagtagagataattgatgaatagacaagaggatacgccattggtttttatcctcctgtctggatgaataacatgttaatatgtaattatgtatatatcgtttgtaatttacaaagtagtttcatttacattatcttgttacttgtggacttggtaatacctaggtgaataggaaggtttttttgctcttgattagatttttttctttgtgactctgggagcaaataggtgagtagttgatatcatttggagatacgtactttcagttttatgaatgcttatgaatattatagccagacttcccagagtaaatactacttattgttgaatactagcaaggatgtcca

SEQ ID NO: 719 - DNA, 3882 bp, Homo sapiens
ttgacttcttgatcctgcataaaaccaaggtaaaagagcattcatttttctagttttcacttttgacttttttgaggaaatgtcactactgaattgatgattcagatggagtgattaaaaatgatgtggtccgaagctttgttttttgtttattttggtggcttgtatgaagtaagtcagatgttaagttagttttaggaaaaaggttctttttctgtcttcttccaggttgtgctcctgctttttctatttctataaacacatctactaaaagactcaggacatacaagatagaaagactgctacttaacccatttccctaatgtaaacaagaggagattcataacttgtttctctctactgtagtgtttaggtaattcaaattgattgctaatgtgttagatgtattaagtgaattaagttcatcaactcattaagtccactacaagtctgtgaagtaggtactgttattttcttcgttttacagttgaggaacaggctcagagagcttaaggaatttgaattcatgtagtttaaatgcagagaccatgttcttagctttttccctgtttttgcagtagagcagaagatatcaatccatttcttttggactgctaactatttgataggcatgctttctttccgttagtttttgaagtttcaggtgtagcttaaagcaaaacgcaaacctttaaaaatgaacttgctgctttaaaaaatgtccaggttctggggaatgcattcattttatagttatttattaaatacctgttgtgctcgtgtgccacaagcccagctacatcctggtgactgaaaaagcctacagaattcctgaatcctttaacagaaattaccatccaaaaagcctcaagagcaaagaacagagattctggagatacagcacaacacagcatctgtagctcttagtaaaatagtgttttatttactgattagtacaatgaaaaaggatgttgtcttattgctggactggatctccaaaatcatttgcagctctggtttctttttatagtgtgtctgattatctcagagtgggataaaaataaatatcttgaagtaaattcgatcagaatgaatgtaaattacgtatttatattcttttaaaaactttgggagggacagaattttgaaatcagatgcaagagaatgtcacagttccccgtggccaagattccttcctttacaggctgtaaatgtggtttttgccaatttcattatgttgtcaaaactacagttgctaaaccaaatttgtgttctacaaggtgtcagatctccttatgttaatgctaaatttatttcttatgtgttgtggaattcttactttgcctttttgaaccctgaacctatgttttgtttctgtctttatgtatttcttgcttacttgggattgagaagaagagtgagagaagacaaaggtggtagtctattagaggatagttatgttttattttgaaataagcatttatctcaaacatcttgaatttgttatttatattgcttgatgaggaactatccaagtattaccattacttcttctataactgaactcatcttagtacctccaaatactattttattataccgaacaaagtctaggtaggtaaaaaagtgccttcaaaaatacttggttgtaggagatactatttaagtattatgggaattgcaaggtgttagaagtttagtaagttgatttttattgaaatgaatactttttgagtaagttagtgtaaatttggaaatagttctatgcagcaaaaacaagcttgagaggctaagatataatctaatcattgaaaagttgaaaatgtgacatttgggatatgcatgcagtgatttgctatatgtgtatgttttttcaattagtagatcttataaatcaattagttttgacagttactgatttctgtacccaatgaggtctaattatagcattggataccatgtagtgtttagaaaagttaaactactggtgcccaagttttttttttcttgtagttctaataaatctttcttgaagtaatccctccaattctttatcttttattctttttaaatcttcttaacagaaagcttcagggtgaactaggcattgtcacataagtccactttattctggagtcatgagtactgagagcagagccatggctccagctgtttagaaacttagtgtcctgtattgttctaggatactatctagtaccactccagacaggattgtgtatatggagtggtcagttcagtctcattttcaaggccataaagcactatgataacagcctggtaggtttattttttgttagtattgtgacactttattttatttcagttgccttatctgtagtacctttattatttatctttcttacaggaggggtaggcatttgtattgggcgtggaataacacataacatgctgctgcagtctcattgctttttctggcttctgcagctgctgccttttaggattgaggctcataagtggggcagtccgtaaaaatcttcagttgtgtctttaatcgacagtacctgtcatgcaggtgaaaacagttttagtcagggataattgacttgtcttctgaatactgatttgaaaaggatggtgaataatagcctttgagaaacttgtaaaaatcaaattttatctgaaaataagtaataatgtaaaattttaaatatcatattgtaattttaacctttttttgccctatcatttgattaggagaaaagaaatgggtcgctccaattctagatcacattcttcaaggtcaaagtctagatcacagtctagttctcgatcaagatcaagatctcattctagaaagaagcgatacaggtgatttaatgtgctttaaatttttaaaataattatatcagttaatacttgttgaatgagtatcgtaaacacagtgctaaaccccaaaatgtattttattctcaaagaaccctgtgaaatggatctattgttatccttattgtaagcgagaaaatgagaatgtccaggtaacaagctctagtaaatggcagagcttggattgaaatccagttagtctgactccaggtctcaaattttactgtataatgtatggtaggtttctttgtatttgtccacaatgttaagagatgaattgggtaatgcaagaatttgacagtaaacaatctctgcatattgttttatagtttctcatttctgactgtgaatctttgaattctaacaaaataattttttttgttaaaaaaattaacaactctggttatttttgttaaaatagtaatacatacttagcatagaaaacagaaaccagaagttgaaaatacaaatgaccataataccattaagaattaatagtagttgatgctcattctttttcccccaccaggcttaactttatattatgtatgtatttaattaatagtatctcactgatagttttttgtaatcttttcccccatttaactatatattatgccatgccattaaatattcttttacaacatcaatttaagtgcttgcctagaggtactacaatttgctaatatgtcctaatgcatgtgatatatataacacatgcgtgtgtgtgtgtgtgtgtgtgtgtgtgtgtgttttgtgccttcatttgtaaggtctttaaggtattctctcagtatttaccttagtgaggctttttgattggaaaccattaacttttgtacagatgagttttttaaaaaagtgtatttttgcctttactgtttatttacatgttatattcaaccagagtatttagaatggtagcatggaatactttatttttcttgcattgatatttatttcatttttagttctaggtctcgttccagaacatattcaaggtctcgtagtagagat

SEQ ID NO: 720 - DNA, 634 bp, Homo sapiens
ggagcattcttcctttgtcaaatccaatgagactccgagtgctgggattatctttgctgctttatctgtgggtgccaacgccaccgtagatggcatttgcccattgcaaggctttatcagtgttagacactgctgtaggagacaggaagcagttccagggctaatggcaatgaaacgagggtcagtatttctttttcacccactgttgctttgggtgggttttatcacttgtgtttattttattattactgagtgatagggaggggagcaaataagagagttgatgctttgcttccgaaatctatggagcctcagcattgtattgaaatgtcactccccgctgtgtttcatgagcctcccagcgctttgttcctcgggcagtgctgatcattacttctgcaaccataaattttgcctcctcttctacaactattttatgtcagggaagatgaagtgaccctctatttctttgtacatttcccctttccaccttccctatgattaaaaatacatcttgggtctctgcccagggttttcatagggttgctttccaaccatttttacaaagatagttgactgtttcttatatcagatatttccagagaaagaatgttcttaattaagatgccattcc

SEQ ID NO: 721 - DNA, 247 bp, Homo sapiens
ccaataagcatctggaagtctgtactaaggaattgctatcttcatttccattcttagagacacctacattgatgctttcaactctatatgaaagtcaggaagcatggcagggaggaagggaggggaaaagcagggcctacatggagagtctttactaggagagaccagcttcatggaaatgacattatgcccagaaatagatggtgtttttaaaaatacacataagtagagctttaagttaaatctt

SEQ ID NO: 722 - DNA, 3032 bp, Homo sapiens
cttcttcaaaaacagtgaccttgtttgagcagtactgtagtggtgggaatccatttgaaattcaggccaaccacaaagatgaagaaacagaagatgtcttagcttctaatggggtatgtggtgtatgtgaaacataagtgagttttttttatttaaaactgttctactcaatgaacaaggcaattcactacatttacgtatccatttactaccaccctgcctgcctgtatacttaatgtacctatgctattacatttatagatgatgactttacaatatgctttgttgaccttgtcctcttgaatagtaaattttccctttatgtttgctttatgttcttattacatgatgttcttatcaggttgctaatcaagtagtagtgtaatttcttcactgaatatttacgtgatatattatgtgaatattatgtgatatattgtgagatgacggaatagatatcatctaccctttttctcgacaccctttatgggtcactgattcattttgttccatgtccctttatctaagagaaagtggtaatgtcttgcatagttgcctggcagggatattttttgagatttagaagtacaatgttttaacaacactttgaggacctcaaaaacaatattaactagacgtagtgtgagttagtggaaaggatttgaaggcaaataatgaatatcatctttattatttatcagctgtgtggcccttggcaaattattttaactttgtgaccctcagtttctccatatttacagggagaggaatgcttgcttcacagttcctgcatggtgttttcacagtattttacttgacttaatattttgtttgatggtttcttctgatcttcataatttccataatgacccaatatgatttttatttttgatttgatgaagctaaagtgaaaaccattcagatgtgacaaaatatgttgaaggatttgtctttatattttatgttagttttagaatttatttttcatttggtgaagacaaaattcattaagtttaaattgtttcatagtaagccatatttaaaattatgattcagtgattctttgtgacattttgcctctgtgaagttggcttaaccgagaggaatttaaagtcattccaattattttggaataatatatctctctataaaagtgattcattaattaaaacttagatagcatttgattctcattatttgcagcagtgtgttctataaagttgctgtgaatactaaattagcaaatactgaaccattactcccagagcaaatataggattaggttcctgtgagcctcgggttacgacatgtttatcagcccatcagtacataatctgaattcatagccaacaacgctgtaactcttgcctaaatgaagcttatcagacacacatattttgtttctcaggcacatcacagccttcttgtacttagaaacactagacagcacttcaacgcaacacttgcagtggcattctaaacagttaaatcaccaacaaaaagcacaaaaatacaaagcacttggcactaaataggtcaagaaaaggaaacttgtttatagtatgagagcctaagcaagaaggcagagcatgccttgtttgtattcagctgggaacatgcatgttggatgactcaaagttttcactgttctgcacgtttatgactgactccaaaaatatcagaagtattgactttagggttacaaataaatttcagtgagtaggcaaatttgcaaacattgaatcctcaaataatgagtatctatgatacggtgtggtcacaaacctctgttgttgtaatcaggacatcctagtttatgtagaatacctttctgcatagcatcaggatcacattgtgtataagtataaaggagtacctgtaaggcttgtttgcagttattaatgtgtgatctgatctttccaggtgcaacttatgtccttgagaatcagggtccacatttaaatacgacctttcatagtgctttttattaacagactctcaaaaaatagttgttgaattagggggctaaattctttccatgttgttatcatactggtttcctcaactgtcatgtggagataaaacttcctcatagaagtgtctgtatgattaaatgagataattcatgaaagcacttagcataatacttggttaaaaactcagtgttagctattacttaatgatattaatgttagccatttaatcgtattaatctatgacattaatagatgatgatgatgatgatgatgatgatgatgatgatgaaagtgctgtcactgcttcctttactgtgtgcatgaattccactgtctttcccatgctggcattgggccatggtgccataaagatgatgaaaatgttaggaagacaccctttgtctcaagagtaaatccaccatttttgtcctcattctcagcaggtccctgtgttctaagcttaattttctaagctgccctcggaattaaattttatagtgaattagaacatcagcatgtgtgttgcatgtgtttattaagctgaagtaatacttccagaatgccagaattggatactgaacctctttttaatgagttttattagcaaattggaaataagtatggtgaaacttctgagagactttaagaaaaaaaaatgcgaatgtatactctttaggcctagtggaatgtttgttaggttttggtttatggcgatttgattttgttgcacattttcaagcttttataggtgtaatatttttcttttgtgctgattgaggtagaatgatgaagacaatggaagaataattagattcttggtgacaacattaaagctaaattaagaattttcttgtatttagctgtttcttataaaactgagtactttcactgtgttgagacaccccacgaaaagaggccctttatactcattttttaataacctgtgttttcttcagtatgaatctgatgaacaagaaaagagtgcctatcaagagtatgacagtgacagtgatgttcctgaggaactcaaacgagactatgtggatgagcagacag

SEQ ID NO: 723 - DNA, 213 bp, Homo sapiens
ggggttttttttttcatagttacaaatttaatcatgctgtttttctgcttagcttttagtgactcaccactgtgttcaagataaggttcatatccctcaggtttgattgctttcagagatatctggcctttacttgcctcctttcttgtcacttttccctctgttcacttcttctacatgcgaacgtggtgaactccttgtacttttctgagc

SEQ ID NO: 724 - DNA, 8537 bp, Homo sapiens
ctcatatgaaaaaaatagatggcatgctaaatgataaccgaaagagacttcttttgaatcttcatttggatcaatcattcaaggtatttccttctgatgacttattagcaaaactcaatggcagtcatagtcttaagtataataggaaggaaatttatgaaaattattcacttacaacatttttcacctaatgaaaatttggcttttattcattgtaagtccatttagtttgtcttcttagtgttaatcacttgcttttctccacttaaatttattttttaggcatttatagttatctattatatcttctataaaataatttccaaatgttcttttaacgcttttcaaaatttttacattttgtctgtaattaaaattagcttttccttagcacagttatcaaaattcaccgtacttgcctcatttattcaatatcagaggaaacgctgatttttataagggtaggaaatgtatataattctatatgttaatatatcttggcaatataagttggttttggtgttatcagaaatatagaaaaagctaatctaaactcaactcagataatttttcatagaagctaacttggtagtttaaaaatttctagctttttttcttttcttttcttttttttttttttttgagacagagtctagctctgtcatccaggctacattgcagtggcacaaccttggctcgctgcaacctctgcctcctgagttcaagcagttcttgtgcctcagcctcctgagtagctgggactacaggtgcccaccaccacacctggctaattttggtatttttagtagagacaggattttaccatgttggccagtctggtctcgaactcctgacctcagatgatccgcccaccttggcctcccaaagtgttgggattacaggcgtgagccactgcacccggccgagctttttatttcagttggagaaaaggcatgcaaatttattaacgtgcacatgggagagaatcacagaatgattactccgtagcctttcttattcaaagtataatatcacatcaagaatcatttggttatatctaccttagggaacattttttaattgatggtaacaatattatacatttgtataacttgttcacatccctgttttatgtgaactccatgtaaaagtgagtattgacttcatttcaattaggtgaaaactgaggccattagattgcattcaaaattaaatgacacaaaactatcatagtagtcatgtattcttcactgccatgtattcgcaggaagaaaaaaaatttagaagctagtaagaaatccagtactaagaatttggtctcctgactcctagtccagtttttgtttgttcgtttttgtttttgagatggagtcttgttctttcgccgaggctggagtctagtggtgtgatctcagcccactgccatctccacctcctgagttcaagagattctcctgcctcagcctcccaagtagctgggtccacaagcatgcaccaccacatctggctaatttttgtgttttcagtagagacagggtttcaccatgttggtcaggctggtctcgaactcctgacttcaagtgatccgcctacttccgcctcccaaagtgctgggattaataggcatgagccacggcacccagccctagcccagtgttttctgcttaactgctgcctttaaataaatgaaatattctcttgtgaaatactatattttgtggagacaagggaacatttttagataggtgttttctaaagatttactaaatcttaaaaattaccaggtttggctaatcactgttgaaatgtcaaaccagttctctaacaagatttctaattctgttattagttattaattttgataattgtcatataaagcaatttgctttttttttttttttttttttttttgagacagactctcgctctgtctcctaggctgaagtgcagtggcgcgatctccgcccactgcaacctcctcctctcctgcctcagtctctggagtggctgggatggcctggctaatttttgtatttttagtagagacaggatttcaccatgttggccaggctggtcttgaactcctgacttcaagtgatctgcctgcctctgcctcccaaagtgctgggattacaggtgtaatccatgcccagccttagcaatttgcatttcaaagcaaaattacataatattaagagttagactgatctgaagtaaaatattacaaatagtagagaaagaaagatttttctgttctttagaaataattagtgtgctttcctatgttgatcttggtgatgttaggagtcctgaagctttttcaaggtaatgatgttctgcctttttctgaaatctgtgtacttcagatcatcttaagcattttgtggtcattggaaagatttaaattttcttctttcatctccactgacttagtgtgtgttgtttccaaatttagaatctttagactttaaattctatttgttgcaaataataattctggatccaaaaattgtcaaggtgcatgttttaaatagaaaacaccagagtacatgataagtgcacaaataatctgagaaaggaacgaagctcgaacgtgatggtagctcactgtggtagaaaatgccaaaagtgttattgtttctatcaaatgaaatttagtgcccttctacacttatactaagaaaaatttaggttgcctgtttttaaaaaggtaccgttttcgggactggcgcggtggctcacgcctgaaatcccagcactttgggaggccgaggtgggcggatcatgaggtcaggagatcgagaccatcctggctaacacagagaaaccccatctctactaaaaatacaaaaaattagccgggcgtggtgtcaggcgcctgtagtcccagctactcgggaggctgaggcaggagaatggcgtgaacccaggaggcagagcttgcagtgagccgagatcacgccactgcactccagcctggatgacagagcaagactccatctcaaaaaaaaaaaaaaacaaaacagtaccgttttcagggccccaataccaggtgcttggaaacaatagatgagtttggagaagagtggctttaaaggttgtaactgtttataaaacacttgcgcttatcgaatttggactgcattctgaatcataaatataataggaggacttcaacatttttagtgtcaaaataataaatgatggtaggagctcgatttaatttttataaagtcataatcaaactagttaaatgttgccacaagtatcattcagttattatttgtagcttttcagtcaggcagaatgatttgccaagtaggtaagggcataaataggccagtggcttatttatttatttatttatttatttatttatttatttatttagagatagagtctctctctgtcacccagactggagtgcagtggcatgatattagctcagtacaacctctgcctcccgagttcaagcgattctcttacctcagcctcctgagtagttgggattacaggtgtgcaccacctcacccagctaatttttgtatttttagtagagacaaggttttgccatgttggtcaggctggtctcgaactcctggcctcaagtaatttgcccaccttggcctcccaaagtgctgggattacaggcatgagccaccattcctggccaccagtggcttttaaaggatggagtggaattggttttgccacataaccactgtcaaaaaacccatcatgctctgttttaggatcttatcttacaagtacttgtcttgcagtcaaaataagcaagagaagagtgaagccagagaagcactacagtgccgcttctcctctgtcgtcatcttcaccagaggcagatgacttctttatagcaaggcccagccacatttcacggggcaagcagtggtttaagtggtagggctttagtgaaacatgtatgtcttcctttctcctgccttgaagccagagacattactagaaagaactcttggccctgttaagggttcccagtgtggtgtgctgttgcttaaataagcaggtcatagagttggctcagatttaagggatttaagggaaatagattacatatccaataggaagggctgcaaagagcttatgaccatgtttaaaccccaacctgtgtatgtatatgtatgcatatcccatcagtacacacacacctctctgcaaataggtgtttgtgtgcacacacacctctctgcaaataggtgtttgtgtgcacacacacttctaaattttagatagctagaagtagtttaggttagttttcttctggtgtcagttattttgcttcattgttttccagaatgctttggaaagttttcctgaactaacaataattactcgagattctaaagcaaagagtggaggaactgctatttctaaaatcaaaatgaatggcaaagcctataataagaaaactctaaggacttctaaaacaaccaccaaatctgcacaagtaagtgtaattgattattaatgtaactataccttttccaattgttaatacaattcctacttaaaacattgaaacaagcaaatattttactatgttgtcattaagtgtgaaggtttttcaggtaggaataagcgtcactggcctgaggaacagggacgcatggtggtttattgtttttctatagcacagtatcaggcatataatatgtgctcacaaatttcttaaattgactaatatggaagaaatcatctcgtgctcatgtttatatatttgtaggtagtttttcattttttaaattgcatatattatgtacaaaatgttttgaaatgtgtgtacattgtgaaatggctaattcaaactcattaacatatgcattacttgtaatataggtatatttttaattgtatatgcatgcacatagataagtaagtgtgcagaacacattccataaaaagatgaaatgtttatttcatatctgcaaagtcattaaaattggaatttgttcatcttcaaacatagtataaattgttataaccttttcagaaaacagtttggcaacatatcaacttcacagcaaaaatgtattcagggctaagcacaatggctcaagcctataatcccagcactttgggaggctgaggcaggaggatcacttgagtccaggtgttcgagaccagtcttggcaacaaagcaaggccccatgtctaccctggggggagaaaaaaaaattagccaggcatggtgccatgcacctgtagtcctagctacttgagaagctgagtgggaggatcgcttgagtccagggaattgagactgcagtgagctgtgattgcacccctgcactccagcctgggtgacagaatgagacactgtctcaaaaaaaaaaaaaaaagtattctgtagaaatagattcagaaatgcataaaaatacatacctttgctcattgtggaattgtttgtaagagcaatccaattatgtaccaccagtgtgaggttagataaatgaagagccacgtaatgtcatactacgtgctttttataaagaagagatagatttgttcattctttcagaaaaatttttttgagtgcctatagtatgccaagtacagttctaagtactagagatacaacagtgaaaactggttaaaagtccttaccctcatatagtttgtatttggggaggatggggagggacagctatatgtactaaatgaaaagatagccaattattagttaggtcaaaaaacacgttggaagaaagaagaaaagttgctagacaatatgtatagtgtgattcccttctcattacaaaattagtgttattaacatacatgttatacctgggggaaaacattaaaaaatatataacatgccattagctttgtttagctctgaagcaggagattatagggagcttttattttataaatcatctcatatgtttattgtttaaattttcctataatgcttaagttttttcaataatgcatatttatatgcaggataaagaataagattttaaaatataatttaaattcttattttgaataagtctctccatattaacccaactgaatacctacccatatatgtcattttcaacattgccattgagacttttgatctagtattttcctcaaagtgttcttagctcagatactccatgaaatgtatctataaacttttttctttttataggagtttgctgtcgatccagagaaaatacagttgtattctttgtatcattcactccatcattataagtaccatgtttatctgatatgtaaggatgaggtaatttcttctcatttacttaaaaaaaatgtttttcagaatgttaaggagactctagccatagtattttggagtgttttaaagagagttgtgaaatacatgtgtgtatgtattttgtctatgtattctgtaaataatgacttgatttattgttctgagtctctctgctatgttttgtgctcagatttacccgagcctcaccacctcttgtaggagctataattggtaatgttttgaagctgttggtgcttgctttacatcgccataataaatgatgttttattgcattttgttctctcacagtgtatgatgatcttgctttaattcacttcagtcactgctttgacatctcactgccttacttattacttagaatggccttatcccacttaattgcagagaagtggggttttgtgccttggcatgaaaaactgaaagttaaaatttaattgtagcttttaagttgttcagagattatacatgacaaaatatcacctcatggatgggatataagcattaatttccacagccatgctaaatggttgtagacaatactaccttatttgaccagcactatcacttcttttcattataaagggtccaaggctatatctaatgtgtttgacagtagtctggtatggaaagatgctcataaatctaacctttatatagcaaaagagaaagcaaagatggtgatgcaacataggttcactgtttttacaatgctctaaaatgcagaatcgactccaaaatttgtcatttgacttttaacgtaattggaagaaatggagaaagtctgaagtactttttctagccttcctttctgccaccttggagccaaagatgagaggatgagatctcacccaaatttagctgaaataatcattctccatggataggattaagaaaaaaataaaataccagtacttgtagttgaacttaaatatgatgtgataagtataagctaatttggcgattttctttttttagatttcttcggtgcagaaaaaaaatgaagatttaggacaggaggaaattgttcaactttgtatgaaaaatgtaaaatgggtggaggacctctttgaaaaatttggagaacttctaaatcatgtacagcagaaatgttcctgacttttccacaaaaatcccatctttttatagcactaatgaaatggcagatatggggtggtcaaagataatcagatgtcaagtagtggccttctgcaggccggccgcttccatcatggaactgtcattaccacctctgctgaaggacagtggtgcggcctttaggaacgaagttagtcctctggaaatggacctaaatcccaccacatttttaccctaatgaatgatttttctattttgtaaaccattgggtaacttgagtcatattttcagaaacattttttgacaaatgatgaagcatgcactaagtataatttttttttattgctagagaagtaacacttaaagtaacgattttttttttctgactccggctaaacaccagaatgacagagaagtggcagaaaccatatgtttgtactcacatctggccacaaaaccagaaatactgtacattatgtaaagaggtctggtgtggtgtgacatcctgtataagaatatcatcaatttaaaatataaaatttggaaactattctgctttacagactccttttactcttaacatgttcaggaaactggatgtggaattggtgcaattctctgactgctttttgtgtcaaattatattgtgataaaaaaacaatgacatactattttccctatcgcaaagaaaagtattttcgtttatactgttttttcctttggaaaattttcaattgtacattttatttcactgatagttgtatttttcacaaggaaaatgttgtggttataattacgtttgatatatctctacaacaccttttgttattttcagtaaatcttagttatatgttgaatttctaatgtgaattctatcttgaggtaaccatttttttcatacagatttgcttcagtgttatccagaatatgcattcagtactagaattagtttagctttataaatagggctgtgttagacactgcagtaattttctaattcataaaataaacttcttactaaactagcacttgattaacttgttgaggtaaaaatctaactacatttacattttgaagaataaaactgataattagactatttgcagtgttaaacacagcttccttaactcttagaactggaagttgt

SEQ ID NO: 725 - DNA, 2322 bp, Homo sapiens
caactttttatacttaaaacctcagtaaactggcaaagaattgaaggtaatgtgatttgatttgagaataaaacattgtagcattgggtgaaaaatgagtatttgagttaagcttacatatttatttctgatggttatcttattaaaagcaataatccttaatactgtacttgccattagactaggtactcagtaatggaagtttctctcaagggttaaatgttccatttttgaaagttttaaaaaacctgtttgggtggtttattttgaaaacaaaagtaacctattagattcattttgcctaactcatatgagagatgcagagtatcaacagtgggagcatcataaaatgaattttccaagtggagaggagtaggaagcagccatatgatagtattgactctggacagaattgatgtctttcgtttccaaagtgcagagtagggaactacatttcctaatgtggcattgtaaatatacatctttatattactcttccagcctacgttcctaaatcattgataatttaaatattttttaaagccaccttaatttaggtagctcttggaatcgatgtttgaattcactagccacattttcttcatgatatgcctcgtggcaaacaaagatgtttccttaagatgaatcttacatttcccatagaaaataacccatttcctttggcactgcagttgccctcaaactgcttgcagttgtattcattttagtacaacaaaggttttcataatatgggaggccaagtctatgatactgcctcaaagagaccctattgtgtagatgcatcatcttctctcatttgatccatagagcataggcaaagatgtcaacctcaggccttagagaaaagtggaaatgttattatgacagccgtccatgagttatcgctttgtatgaagttaaatacagtcatgcgttgcttaacagcagggatacattctgagaaatgcattgttaggcaattccgttgtgcgaacatcctagtgtacttacacaaacctaggtggcatagcccacaacgtacccaggctgtatggtaaacctgtacagcatgttactgtactgaatactgtaggcagttgtaacacaatggtatttgtgtatctagacatagaaaacatacagtaagaatatggtattataatcttacgggaccactgtcaaatacgcggtctgtctttgaaaagttgtaatgcggcgcatgactataaatacctagctggttagcatttacattccttgccagggagtttgaaatttatactatagaaataactttaggttttaggtagagttaaagaggtaaagcacatgttgccacaacccaggaaagtatttttaagaaagattggattttcctacctttagagatctaaaaaaaatttaatataaaaaatcattttgtgttggtgtttattactagttcagatgagtggctgctgaaggggcccccttgtcattttcattataacccaatttccacttatttgaactcttaagtcataaatgtataatgacttatgaattagcacagttaagttgacactagaaactgcccatttctgtattacactatcaaataggaaacattggaaagatggggaaaaaaatcttattttaaaatggcttagaaagttttcagattactttgaaaattctaaacttctttctgtttccaaaacttgaaaatatgtagatggactcatgcattaagactgttttcaaagctttcctcacatttttaaagtgtgattttccttttaatatacatatttattttctttaaagcagctatatcccaacccatgactttggagatatacctataaaaccaatataacagcagggttattgaagcagctttctcaaatgttgcttcagatgtgcaagttgcaaattttattgtatttgtagaatacaatttttgttttaaactgtatttcaatctatttctccaagatgcttttcatatagagtgaaatatcccaggataactgcttctgtgtcagtcgcatttgacgcataactgcacaaatgaacagtgtatactcttggttgtgcattaacttacatgtataatttttggcatctgtgttcacaaatgcatgtgttagcaaatcacctttatttataagtgacaataattgaagttaaggatataaagaaacctgcatttgtagtccagcgttttcatttggtccataacacaatgtatggaaatgtgaaagacaattttgtacatttgtttgttactaactcagatcattaaaatgaaaacaatttttttaaacaagaaaatcagaa

SEQ ID NO: 726 - DNA, 424 bp, Homo sapiens
cagagacccatggttttctaatctatgtgcttgaacattctaaaacgagtccagttctagtaacctaaagtaaatttgttaaccaaaatgataggtaaaaagatctatacatcttaatgaaataaaacattcctgcttttagttattatgtatgtacaccatatatgaataaacagtttccaaaaacttaaaatacaaaatatattttaccaaaaattatactgaatataatttaaccttggggaatccagaatacttagtattttcacatgaaactacaaatcatagactctgacactttgatttttaaagtactctgtccataaaagatttgtactgtttagatgggagaaacctctagagagagtaaaaatgaattacactgtatcttatatgaagtaaaaaataaatcagaggtgagaat

SEQ ID NO: 727 - DNA, 864 bp, Homo sapiens
cagagacccatggttttctaatctatgtgcttgaacattctaaaacgagtccagttctagtaacctaaagtaaatttgttaaccaaaatgataggtaaaaagatctatacatcttaatgaaataaaacattcctgcttttagttattatgtatgtacaccatatatgaataaacagtttccaaaaacttaaaatacaaaatatattttaccaaaaattatactgaatataatttaaccttggggaatccagaatacttagtattttcacatgaaactacaaatcatagactctgacactttgatttttaaagtactctgtccataaaagatttgtactgtttagatgggagaaacctctagagagagtaaaaatgaattacactgtatcttatatgaagtaaaaaataaatcagaggtgagaatattgttactgcgggtatgagttgttgaattcctatcatttgtgatgattggttaacttcttttaggtaccctttttacccttttttagttcagaaataattctcccagctttataaatagtacactaaacatagtttaactttttttaatgactcattttttcattaaaagcataatgtaccatgttataatgccattagcagttacttaaatgctttaaaaattgctgattagttttcaatgtcagttggtttcaatttctagctctctctctctctctcctccccccctctcattttctggttcaatcttagtaaattaacattctggatttaattagtagttctaagtttacacctggcctgagtttatgttaacatgtaaccctcaattggaaatttttggattctgggatggcagtactaaaatactttttatgt

SEQ ID NO: 728 - DNA, 1220 bp, Homo sapiens
ttgtaatataggcattttgtaatatgtttgttggcagataaataatatattatataattattctagatattaattaggaggcaattaaaatatgcttttataaatatatttaagtcaagagtaaggaaacctctttaaggtaatattgaaaataattatggaataaaatattcttgctgtttttctgtgttctttatttttgcagggctatgtttgaagtaaacatgaaagaaagagatgatggaagtgttaccattactaatttgtcctccaaggcagtaaaagcatttctcgattatgcctatactggaaaaacaaaaataacagatgataatgtggaaatgttcttccagttgtcatcatttcttcaagtttccttcctatccaaagcttgcagtgactttttaataaaaagtattaatcttgtcaattgtttacagttattatctatatcagatagctatggctccaccagtttgtttgatcatgcattacactttgtacaacatcacttttctttattatttaaatccagtgatttcttagagatgaattttggagtactacagaaatgtctggaatcagatgaattaaatgttcctgaagaagaaatggtactgaaagttgtccttagttggactaaacataacttagaatcaaggcaaaagtatctgcctcatttgattgaaaaagtgagattacatcagttatctgaggagacacttcaggactgtctgttcaatgaagagagtttactcaaaagcacaaactgttttgacataatcatggatgcaattaagtgtgtgcaaggttctggtggactcttccctgatgctcgaccatccacaactgagaaatacatattcattcacaaaactgaggaaaatggagaaaatcaatatacattttgctataacattaaatctgattcatggaaaatactgccgcaatcacacctgattgatttgccaggatctagtctttcgagttacggagagaaaatattcttgacaggtggttgcaaagggaaatgttgtcgaacggttcgactgcatattgccgagtcatatcatgatgccactgatcaaacctggtgctactgtccagtgaaaaatgatttcttcttggtatcaactatgaaaacaccaagaaccatgcatacatcagttatggctctcgatagattatttgtcataggtggaaaaactagaggatcccgg

SEQ ID NO: 729 - DNA, 5671 bp, Homo sapiens
gttctaaggacatatggaattggctatggataattcatatgctttcaatcaacgaagcacatgtaatggaattccatctgagaagaaaaacaacttccttgtatcagaagatcatggacaaaaaatcttaagtgtactacagaattttagagaacaaaatgtcttttatgatttcaaaataattatgaaagatgaaataatcccgtgtcatcgttgtgtgttagcagcatgcagtgactttttcaggtactttaccttgtctatgcctcagattttatgatttggataactaagttctattttatactgcactcaagtttttccccacaagaacatgcaacagtaatttttaattctaaaaaaaaaaacaaaaacaaaacctaattaggctgggcacggtggctcacgcctgtaatcccaacaccctaagaggccaaggcgggcggatcacctgaggtcaggacttcaagaccagcctggccaacatggtgaaactccgtctctactaaaaatacaaaaattagccggtcgcaatggcgtgcgcctgtaatcccagctatacaggaggctgaggcacaagaatcgcttgaacccaggaggctgaggttgggtgagctgagatcgcgccaccgaactccagcctgggcaatggagcgagactccatctcaaaaaaacaaaaacaaaaaaccttattatgacccagattaactaaagaattttttttttttttagagggagtctcgctctgtcgcccaggctggagtgcagtggtgcgatctcggctcactgcaagctccgcctcccggcttccagccattctcctgcctcagcctcccaagtagctgggactagtgcccgccaccacacccggctaattttttgtatttttagtagagacggggtttcaccgtgttagccaggatggtctcaatctcctgacctcgtgatccgcccacttcggcctcccaaagtgctgggattacaggtgtgagccactgcgctgggccgtgattttttagtaggagagaatttaagactacctttttttaacgtataggtcttcccaggtcagcatttcccaaagttctctggaacattaatcccttgaactacgctgggacagaagaaatttttttgatggtgtcagctttgtttgggggatcccctgtgttgtattattttagaaaaagaagacgacaggttgaacaaaaatggaagcaaaatttgaagaaaataactctgcgagaaaagaaaatttccgtcctgtgttgtattcatgtattacggggagaggagggtctaaccgatttaaaaatttatcctctccttagcaaattcatcctctccttatattagggaaaagtacttcttagctataaggcatttcttgaaagctctcagcttgttctaattctaagcaaccttctgaatataatttggtttcccatgtagatcaccctaaagagaatgtcctattcataacactgcagtaatcactatgatgacagcagatttccatttctgcgaagttaagggtcagacacatgaccttgcaattactgtgttaattgtatcaaggtagtactatcctgtgaggcttcttggtcaatagacaagccccttttggtgaaaccctgatcttcagccttcctagttatactacaataaacttaaatcctaattgcaatattttgcattatgttcatttgtggaagcaattttaatttgaattaagcagggtttaaatctccaataaacttgattaaaaaataaggtttaagatatagaaatactaagatgcatattttatatgcaagttaatttatactgttttgaatcctcaatttaacccttaatttttttttaccaccatctaattagatctcatccttattgcctttagagtaaatcttacaagctagatttcattcaacaaacatttactgatacatacttcctgctaaacacctgttcctgtaggggctcttgctttgaaattgggagcaatggcttagtactgcagcacagtttactggggccatggaggctacaacggtcttgaactagctgtttgcctaatttgactatatgtcttcatctattctttttatttcttctctcagttaatcaaagttgttctttgaacttccctggggcccttactgtcttatactctgccattcttatttctaccagtgtcttccctcctctcttataacctaagttttcttccatgtaactcttttctgcccccatatccttcaggtcccctcttcatcacaggaagctgtgtggtacagtggttaagtagtgggcctcttaatacatatgccctaaatctaaatccaagctctaccatttactagacatgttttattaggcaagttacttaactccttcaggcctcagtttccttatttgtaaaaaagtaggattataaaaatgggacttaactcatagaattattatattgcttaaatgaaataacatataagtgataattagcaccgtacctactacattcagttaatattagctgctatgattattatttctaaacctagcaaaaatataaataatctggtgtgaacacacagcttgatttccctgtgatgttttcatgctaataaaatactcttatgtaggcatttcaatttatggacctgcactcttcttgatgctattttttattcaatttacatataatttttgcacatatttctttgttcagcttactgctagttttttataggtctgcttttagtttttaaaattactgttagaacaatgtatttttaaagttttctacctggtttaaataacaaaaatatcagatcctttattacatatagtactttattaaatgagtacataattcacattaaaatatgtacatatgtaatagacatttgacaatttacactctcctataatgctgctaattcacaatatgatcaaactcactcaatggaatactgaaaatgtaaaataaaaatgtcagaaaagtgcacaatgcatgaaaatatccctcttacagtgtttttggaaaacaaaaattattactgagatggaatgtcattggagacaagaaattgaaaaggaatcacacatgttttatacatactttatgataagatggtaaattggagatagatgttaactggatactctaagattaatagaatgaaatatagaaatataatcttacacgtgtcttctcaaagaaaatgtggaagccgatagtaaattataaatacatcaaatctgatagaaaacattttttaaaataatgataccaataaaagctaatactttgcatcagttaacccatttattcttctcagcacccaatgacatagatactaccagtacctgcattttcagatgaagaatttgaagcacaataaagttaagtcacctccccaaggccacacagctaataagtggcagtggctacatacactggcagctgggccctatggaccatatagccagctgggctacatggactcttaatattatcctaaactgctgtaggtgtcttaataatccatataattattatcacaggttaatatttctattgatatacattactaaaaatccctgcgtaatgtgtaacattttgcaagtcccctcatatttttcagttggatgttgtactttttaaatagatttcattaccttcttgagtagactctgataagtaaattggttttcccctagtatactttgggcaactaggaacactgctcagaaagacatcctggacaatactggcacaaatacaaatcattattaaaccagaagcaatagtaaaatacattttgttccatgcccatacatttccaaataatttatgtttttacctaaactgagccaaagaaattctcagttccttagattctgtcaactttaccatgtagcaataaaacaaaacttattatgaagaactttcaagctggtctaattattcaaatttgagggcctatctctatctctcagtgcctattaccaaacttttctttttttcacctttttgcttgatgtggtacactgttattgtttagttttaggaaatcacattccccttctcctaaagaactatataaaatatctttttagacatgtatcttatttggtgaattttccccacccaatagagtcattggagacatcaggtatcttactgtactcttttctgtttcattaatgtgaaatcaaagatgaatttgaaagacacttttaaatcctaagccctaaataattatattttaagtaattttagttatcaccagcacagctgttactaattaatccataaataaagaaatttggccatcagcaagattttgccccaatagtattaataataaacaagtatacaaaatttgaatctttttatagtctttttttattagttgctatagctcagctgtaatgtacatttttgtaatataggcattttgtaatatgtttgttggcagataaataatatattatataattattctagatattaattaggaggcaattaaaatatgcttttataaatatatttaagtcaagagtaaggaaacctctttaaggtaatattgaaaataattatggaataaaatattcttgctgtttttctgtgttctttatttttgcagggctatgtttgaagtaaacatgaaagaaagagatgatggaagtgttaccattactaatttgtcctccaaggcagtaaaagcatttctcgattatgcctatactggaaaaacaaaaataacagatgataatgtggaaatgttcttccagttgtcatcatttcttcaagtttccttcctatccaaagcttgcagtgactttttaataaaaagtattaatcttgtcaattgtttacagttattatctatatcagatagctatggctccaccagtttgtttgatcatgcattacactttgtacaacatcacttttctttattatttaaatccagtgatttcttagagatgaattttggagtactacagaaatgtctggaatcagatgaattaaatgttcctgaagaagaaatggtactgaaagttgtccttagttggactaaacataacttagaatcaaggcaaaagtatctgcctcatttgattgaaaaagtgagattacatcagttatctgaggagacacttcaggactgtctgttcaatgaagagagtttactcaaaagcacaaactgttttgacataatcatggatgcaattaagtgtgtgcaaggttctggtggactcttccctgatgctcgaccatccacaactgagaaatacatattcattcacaaaactgaggaaaatggagaaaatcaatatacattttgctataacattaaatctgattcatggaaaatactgccgcaatcacacctgattgatttgccaggatctagtctttcgagttacggagagaaaatattcttgacaggtggttgcaaagggaaatgttgtcgaacggttcgactgcatattgccgagtcatatcatgatgccactgatcaaacctggtgctactgtccagtgaaaaatgatttcttcttggtatcaactatgaaaacaccaagaaccatgcatacatcagttatggctctcgatagattatttgtcataggtggaaaaactagaggatcccgg

SEQ ID NO: 730 - DNA, 438 bp, Homo sapiens
taaattagtaccatatcaattttctgtgatgatgtataccaactataaagcactatgttggtttactacttcagtaaattattcttagtgaattattttctaaattaaaaaaaatgacttggcttttggtattgataatagtattcacaacctgcatctgttaagatgtttgatctttaacccacacaatgtaagggtactgttgtcattgttctcaggtaggtgattctgccttccaagagtatatgtttctttaatcagtttaaaagataaaggcattttgggttttaagacccctgctttacatctcaggtaatgtgtagattgtacttctctggaaccaaatgtagttttctacactcagttgtaaatgttaatctttctcaaatgtgcacattctttaaaagtgtgttcctaagtagaaatacacctaaatga

SEQ ID NO: 731 - DNA, 129 bp, Homo sapiens
ccaccaagcccagctaattttttgtatttttagtagagatggggtttcaccatgttggccaggctggtctcaaattcctgacctcaagtgatctgcccacctcggcctcccaaagtgctgggattacag

SEQ ID NO: 732 - DNA, 1098 bp, Homo sapiens
gttttctcctagtatttttaaggttttccttttttatcttgaactctgggaaaaatcaagaatttaccctggtatggagtaaaagacaaagatacagttttctttttttctaatttttatattttggcaatcacttccatgaggttctaattactatgttcgctggcctgtaaagtactataaaaactacgctggtttcatcataaaagtcagttatggccaggcatggtggctcatgcctataatcctaccactctgggaggacgaggtgtgcagatcacttgagcccaggagtttgagatcagcctgggcaacatggccaaatcccgtctctactaaaaatacaaaaattaaccagccagcctggtgccagcctgtagtctctgctactcaggagtctgagatgggaggatcatttgagccctgggaggtggaggctgccattgaccccgcgccactgcactccagcctgggcgacagagccataccctgtctcaaaaaaaaaaaaaacaaaaaaaaaaaaagaaagaaaaaagaagcagccagttatacagtttctcaaaactttcaaggtaaaattaaaaagtgaaataatttacttcaaaagataaatacatgataccaattaaggcagaagataagctgttcccttaactcaagagtcctcaacccagtataaggtttgatactttccagggggtacacaggtctagacaattttaaggaaatcaattttcagatcaccaactgccttttgtgctcttctaaaattgacgtatccaagcacgattccttgtctcttccatctttcctttcacaatagctcttctatgttataaaagaaagtcaaggccagacacagtagctcacacctataatcgtagcactttgggaggtggaggcaggaggatcactttaggccaggaggtgaagaccagcctgggcaacatagtgagaccctgtctctacaaaagtaaaataaaataattagccaagaatggtggcacgcacctgtgatcctagctactcaaaaggctgaggcaaaaggactacttgagcccaggagtttgaggctgcagtagtgagttatgactgtgc

SEQ ID NO: 733 - DNA, 177 bp, Homo sapiens
ttaggtgacagagcgagtccctgtttctaagaaggaaaaaaaaaaagtcatttctcttattcatctcaagttttaacatgttccttacctcaagaaatctccaatgcaccaaaaggacaattgggagagactggggaaaagtctcatgtgagcaaaacaagaaatattgaaagaaat

SEQ ID NO: 734 - DNA, 1079 bp, Homo sapiens
ttttttttttttttttttttttttggtgagacagagtcttactctgtcaccaggctggagtgcagtggtacaacctcggatcactgcaacctccgcctcccaggctcaagcgattctcctgcctcagcctcccgagtagttgagacaacaggcatgcgccaccatgcctagctaattttttatttagtagagatggggtttcaccatgttagccaggatggtctcaatctcttgacctcgtgatccgtccacctctgcctcccaatgtgctgggattacaggtgtgagccaccacacccagccaaagatactcatttttaagatgcttaataatcaagagttaattccaagagaacataacagactggtttcctaactaatttctccccacttctacatatgtacaaccttgtctattatgaagtgccaaataaacccttaacttaccaaagaaaccatcagaaaggctgatgagtcccgggtggtgtttgttatattagtatttttgaagggttatttgtatttaaagagcagagggaaaaggtaatataaaacttgcaagattacttagatgtaaatggcagtcttgatcttacatgtattttgaaaactatttctaaagaagaattcatatttttaaaaaagttatggctataaaacaataatttggagatttacttctttaatgagaaaaaggagcatgctggactctataatattatatttagtcttttaatgtaccaaactgagttcaagggaaggagaaaaaaaagagtaactaaacaaaataaagatcaaagtgaaaacaaatccttcaaaaacgtagttttcaattccgagtggatagtaaaataaactggtgagcttctaaagcaatattaatgccaaagccccacatcagacaaattaatcaattcctaggagtggttcccaggaacctgtgttttgttaagggtaccaccagactattttagtgtactgccagggtagggaaccaccattctgaataagtccttttttaaaaaaaaaatcatatacataaattcatggaccataataattcaccttcattatataaa

SEQ ID NO: 735 - DNA, 467 bp, Homo sapiens
gactaaatagacctaacagacatttacagaacatgctccaaaaaccgcagaatacacattcttctcctcagcagcacatggaacattctcaaggatagaccatattttaggccataaacaaggcttaaagattcaaaaaaatttaattatgtctagtgttttttactgactaaaacggaataaaactagaaattaacgacaggaagaattctggaaactataaaaacacatagaaattaaacaatatactcctgaacaatgattgggtaaaaggtgatattaagaagaaaattttaaaagttcttgcaaaaaatgaaaatggaaatatcacataaaaaaacctatgcaaaagctgtaccaaaagggaaacatacagcaatgcccacatcaaaaaagtagaaaaattttaaataaactactgatgcatcttaaagacatataccagaaagagcaaacgaagctcaaaa

SEQ ID NO: 736 - DNA, 592 bp, Homo sapiens
gggaaaattacagatgtcctaaaaaggcaactgcatttgacttggattgtttatactgagcctgatcacaaacctcctgaagagaaagctgtgctgaattaagctgatgattgcctagatacagtctaagctggcaatcaaacattgtccatcatagactgtgctaaaatctttcacttgtgtaaacttgcagtaaaactttataagtccctccctaacctcatctgaatggaacatgatatagcttcttgctaaatttgtgtctcccaaatagcaatttataaaaaatcatgattaaaatgccttttattttattttccacagggtctgttttactcccatgttataaaatgcttttctcaagaaagcatagagcccattctcttctctagagagaatcgcagccttgcaaaagagacaactaaaaatacatacatataagtatcaagaatttaaaactcaaaatattaaatatgttacaaaagtatataagcaatagaataaataggatgaatagcaaaatggataaaatcaactgtgagttgaaagcctgaaagttcaggtgaaggtgttgaaaatgcttcagaaaaaa

SEQ ID NO: 737 - DNA, 592 bp, Homo sapiens
gggaaaattacagatgtcctaaaaaggcaactgcatttgacttggattgtttatactgagcctgatcacaaacctcctgaagagaaagctgtgctgaattaagctgatgattgcctagatacagtctaagctggcaatcaaacattgtccatcatagactgtgctaaaatctttcacttgtgtaaacttgcagtaaaactttataagtccctccctaacctcatctgaatggaacatgatatagcttcttgctaaatttgtgtctcccaaatagcaatttataaaaaatcatgattaaaatgccttttattttattttccacagggtctgttttactcccatgttataaaatgcttttctcaagaaagcatagagcccattctcttctctagagagaatcgcagccttgcaaaagagacaactaaaaatacatacatataagtagcaagaatttaaaactcaaaatattaaatatgttacaaaagtatacaagcaatagaataaataggatgaatagcaaaatggataaaatcaactgtgagttgaaagcctgaaagttcaggtgaaggtgttgaaaatgcttcagaaaaaa

SEQ ID NO: 738 - DNA, 402 bp, Homo sapiens
ctgctgccagcataactgccttgaggcccaaaagcaggcatggtaagctcaccactgccatcactgggatccaatgactaaacctctggtgcccctattcccagcaaaactttaccacagcctctgctaaaaacgataccctaagccactgagaaaggtacagacaccactgatactctttacagccaaagaaatcatataaagacaggccgggtattgtggctcatgcctgtaattccagcactttgggaggccaaggccagtggctcgcttgaggctaagagtatgataccaacctggggaacatggcaaaaccctgactctactaaaaacacacaaatttgttgggcatagtggtaggcacctgtaatcccagctacttgggagactgaggcacgagaa

SEQ ID NO: 739 - DNA, 150 bp, Homo sapiens
aggccagggaaagtctattgacaatggatgcagggcagaaaggaagctgcattctcaatcttcttctggtgtcctgtgattgagcctttaccttagatgtaaatcctcccagagttttgtctcttaccttagaatttctattcttttttt

SEQ ID NO: 740 - DNA, 150 bp, Homo sapiens
aggccagggaaagtctattgacaatggatgcagggcagaaaggaagctgcattctcaatcttcttctggtgtcctgtgattgagcctttaccttagatgtaaatcctcccagagttttgtgtcttaccttagaatttctattcttttttt

SEQ ID NO: 741 - DNA, 8207 bp, Homo sapiens
cttggttttctctcattatgccttttgcaacggttatcttttttgtcatgatcctggatttctacgtggattccatttgttcagtcaaaatggaagtttccaaatgtgctcgttatggatcctttcccatttttattagtgctctcctttttggaaatttttggacacatccaataacagaccagcttcgggctatgaacaaagcagcacaccaggagagcactgaacacgtcctgtctggaggagtggtagtgagtgctatattcttcattttgtgtaagcattccccccttttttttattttaacaaatttctatttatggattttgatggtcacatcatttacttattttgggaaattcttcagtgcttgcatttagtgccgacagttactgtgttggttttggtagcttaaacttcgaaaatttaaacaatattgttttttctctttgtagctgccaatatcttatcatctccctctaagagaggacaaaaggtacccttattggatattctcctgaaggaacacctctttataacttcatgggtgatgcttttcagcatagctctcaatcgatccctaggtttattaaggaatcactaaaacaaattcttgaggagagtgactctaggcagatcttttacttcttgtgcttgaatctggtaagatttttaaatgttaattgacatatcctaaaagcataatattttaattttgacagttctggtataagtttagtacttcccaaatttctgataataagatgagctaaaatttaaattttttctaagtataatagcaagattacgagatcatattcagattccttaggcaatccttaaggcatgtgccaccgtgcccagccacttaagcaaacaatttgtgaggcattttagaagcattgatttagtatgttccttcaaatcagtaaatatagtagcatttaaagagttctaataacttacaggatctcactattagcaatcagtgttataaatcacctattgctaacattttataacctagtttattatttttatagacatataaacaaaaccatttttaaatagtttctaaaatggatttatcttagttttttacaatttaatagtttgtaaaatgggtttatcttagtttttacaatttgtgtgaaatagggtttctaatgtaagtggcagttaaataactaaacaattatagcagatcttcaagtaaatttggataattaagggttaaaatcctcctaattgaaacagtgcccaacatactcctccctttttttttggtgacatttttagctttttacctttgtggaattattctatggcgtgctgaccaatagtctgggcctgatctcggatggattccacatgctttttgactgctctgctttagtcatgggactttttgctgccctgatgagtaggtggaaagccactcggattttctcctatgggtaggtacattgactgtcgaggtggtatatcttaagtgcaaattccatcttaaggaacagaattatattacttatattacttttaatacaaataatttccaaatcttcatttttaaaaaatgtgaagtaaataaggggatgtgaatcgggcatttgataaatactgaatggaattaatgctcaaagattatgctcccttggccgagcacagtggctcacgcctgtaatcctagcactttgggaggccaaggcaggcggatcacctgaggtcaggagttcgagaccagcctggccaacatggtgaaacctcgtctctactaaaaatacaaaaattagccgggtatggtggcacgcacctgtagccccagctactcgggaggttgaggcaggagaatcgcttgaacccagaaggcagaggttgcagtgagccaagatcgtgccactgcactccagcctgggcaacagagtgagactatgtctcaaaaaaaaaaaagacagggccaggtgcggtggctcacgcctgtaatcccagcactttgggaggccgaggcgggcggatcacagggtcaggagatcgagaccatcctggctaacacggtgaaacccccgtctctactaaaaatacaaaaaaaattagccgggcgtagtggcaggcacctgtagtcccagctactcgggaggctgaagcaggagaatggtgtgaacccaggaggcggagctttcagtgagccaagatcgtgccactgcactccagcctgggtgacagagcaagactctgtctcaaaaaaaaaaaaaaaagagagtaaagaaggactttgatgaatatataacattttaacaaatgtatatattcgttaaaatgttatatattcatatataacgtatatatattcatatataacgtgtatatatatgtgtatatatatatatgtatatatatatgaaggaccttccaggcattaatatgatatttaaaatattgctaattttctattattaattacttagtagtatgaaaatttggacttgtttcctcatttataaagtttatactttaaaaatatttgtccttttccttttctgaaaaatgttctatgtttttaggtacggccgaatagaaattctgtctggatttattaatggactttttctaatagtaatagcgttttttgtgtttatggagtcagtggctagattgattgatcctccagaattagacactcacatgttaacagtaagtctttttattttcctatttggatttctagtcatacttacatagttttttctatcctaaagtttaattgtttgcagttattgctctaagaaggttttattttttacttatatcaacataacttcctatcttgctgtttacatttatactgctccctcttagaaattctctttttttttttttttttttttgagacagagtctctgttttccaggctggagtgcagtggcatgatctcagctcactgcagcctccacctctcaggctcaagcgattctcgtgcctcagcctcctgagtagctgggattacaggcatgtgccaccaccccctgctaaattttgtatattttgtatagatagagtttcgccatgttggccaggctggtctcgaactactgacctcaagcaatcctcccaccttggcatcccaaagtgctgggattacaggcatgagccactgtgcccggccagctatagcaacttttaatgttctccctgtaccaccaaagctttacatgtgctgtttcttgtagttggcatgtcctttccttacttctgcccttcagcctccatcaagattttgcttatgtgaaatactttttttcttttctttttttcttttttttcaagcaattctcctgtctcagcttcccgagtagctgggactacaggcgcctgccaccacgcctgcctaatttttggaaatactttcttttaatccccctcttctctccacaaagtttgttagattccttttctcagtattctcattatgttttgtgcattcttcttttagcaacattgagttgcagttgtttaatttgtcattcttccacaattaagatatgtaagtatcttcaggacctgaattacatattattaactcttaagttcagttctagcacctggcttgtcgtaggaaatcagttgttaaatgacaaaaagcagctctggctcttgctggtggaagcatacatgagtaaaatgtttctataatacagtttggaaaaatagacttttttggattttttagtgcctgtatcctttgatattgactatttatcatacataaacattcacacaaacatatagaagtacatgactctggccgggtgcagtggctcacgcctgtaatcccagcactttgggaggccgaggtggttggatcacctgaggtcaggagtttgagaccagtctggtcaacatagtgaaaccccatctctactaaaaatacaaaaattagccgggcatgatggcgcacacctgtaatcccagctagttgggaggctgaggcaggagaatcacttcaaccacgaggcagaggcttcagtgagcccaggttgcaccaactgtactccagcctgggtgatagagagactctgcctcaaaaaaaaaaaaaaaaaaaagtagtacatgattcattgtacccttatttataatagtgaaaaaatggaaacaattcactgtccaccagtgaaaaaagtaattaaataaatttgttatctatataatagaatattacagagctattgaaaagaatgagatatatctgtatatactggcctgaaaatatttacgagatgtactagtgaaaaacaaattgcaggccatgcatggtggcgggcgcctgtaatcccagctgcttgggtggctgaggtaggagaattgcttgaacctgggaggcagaggttgcaataagccgagatcatgccactgcactccagcctggttgacagagcaaaactctgtctcaaaatgaaaaaaaaaaaattgtaaaatagtattatgattacattgttggttttaaagggtgttatgtgtatgtatgttagtacacagatggaaaatacaccattttaagcgtgactaacccttggtggtagaattataggggactttcatcttctacatttttattttcctgataaaatacacaatgatgaagtatttttcagtaggggagaaggagtacttatgagatgatggagtctctgtaagcagtacttggtttcattcaaagtcattaaccatctaccagcttataaagcctaatgaaattttaaaatctggagtcaaatggtccgaatcaggaagaagtaaataacctccctacacatttaataaagtaaatctcttactacttttgaaaagtaattaaaagtatttgtccttctcatatttatattttccttttataaaacaaatggattgctttaaattgtagatgtaggcaaattaacaccctgagctactactattcaagatcattttgtaagagcagataatcaaggataagtaactttgtttatcctttggagtattattgtggcaccattaaattaaagtaatttcattcactttgttaagaaaaaaatgagaggccaggcatagtggctcatgcctgtaatcccataatcccaacacttttggaggccaaggtgagaagatcgcttgagcccaggagtttgaggacagcctgggcaacatagaccctgtctctaccaaagaaaaaaatttgtttttaatttaaataaatgcgagattactattgtatgtttcctttttattatacttgttttactttggaaaattttactgtgtttaagacataataagaccatatttggaatctgctcattaataaattataattgttggcatataaactgttcaaatttacctagcaatataaagatttcaggtacagtgtatacttgccctagtaagcagtactttcaaactcttcaataaacaaaacaaaactttgcatcatttatttatacataaaccataaaccaagtacataccattcttaattgaaataagtccaaattcctctacttaccaattctgcttgatatttgaaagttaaaatgtttcttctaaaatgttctaaaattcacatttttaaaattttggacttactgaaacttagtaaggttttactgtgaatactttcaaaactgtaaacagaaaaacatatatagctatataataacttttaaataacaagtctatttttaaattactaatttaaaggttttttttctcccttttgctagccagtctcagttggagggctgatagtaaaccttattggtatctgtgcctttagccatgcccatagccatgcccatggagcttctcaaggaagctgtcactcatctgatcacagccattcacaccatatgcatggacacagtgaccatgggcatggtcacagccacggatctgcgggtggaggcatgaatgctaacatgaggggtgagtccttgcaaaatattatcctacttttcaactgtgttctaaatcaaccctctgtgtttatttgtattaagtatttgggcttctggtatgatatgatttttaaaaagcaatctgtgactaaaagaaaggtctgaagctatcactatagaaaatattcttacctgaatacacataaaattaaatattattcagcctttaaaaagagggacattctggctgggagcatggtggttcacgcctgttaatcccagcaatttgggaggctgaggcgggagtaccacctgaggacaggagttcaagaccagcctggccaatatggtgaaaccctgtgcctactaaaaatacaaaaattagccggacatggtggcaggtgcttgtaatcccagctactcaggaggccgaggcagaagaatcgcttacaggtgtgagccaccatgcctggccgtcacagaaaattttttaaaaagaaaatgaggctgggaacagtggctcacatctgtaatcctagcactttgggaggccaaggtgggtggatcacctgaggtcaggagttcgagaccagtctctccaacatggtgaaaccctgtctctactaaaaatacataacttagccaggtgtggtggcaggcgcctgtagtctcagctactcaggaggctgagacacgagaatcacttgaacctgggagatggaggttgcagtgagccaagattacgccactttactccagcctgggcaacagagtgagactctatccaaaacaaaaagaaaatgaaaatatatttgttcttaaatgttagtttttaaatgattataattatatagtccttttcatagtgacagctgaatagatattagttgcaaggtaaacacagtgtgctattatgaaccttcattacaaaaaggaaattcttactccttttttagaaatttttattgcactataaaaaaaatggaggaagtactaatcatttattttgctgaattgtttattctgattgcttaatataagtaatgtgggtaatgtcaaaacttgcctcaagtatgatttttgggaagcctttccagacaaagtacaccataaaatttggcacgctgtgtcatgagtgcctatgtccttatatttttaccactgtattctgaattccttgagggcagtgaccatgttttaggcattttgaagtactagccagtagcagagtatgtggtgcacagtaggtatccagtaatattagtagaatgtattaaaaaactaaattagatgtgccttaatttttaatgtccttatatattttatttgtaggtgtatttctacatgttttggcagatacacttggcagcattggtgtgatcgtatccacagttcttatagagcagtttggatggttcatcgctgacccactctgttctctttttattgctatattaatatttctcagtgttgttccactgattaaagatgcctgccaggttctactcctgagattgccaccagaatatgaaaaagaactacatattgctttagaaaaggtactgtatgtaatttcttcactactttcttccttgaaaatcacatttttgaagtctttgctggaagtaaaacagacaaccaaataaataataaaacaaaacgaggccaaaaaagaaatataaagtagcatttaaaatttaataagttgacctaacaagaaatatgcaagatataaatgagaaaaatacagttttacttaaaggatataaaacagggaccgaatagatggatgagattttcttggatgagaagactctttattataatgatgttgattttattttatttagatttcaatttagttgccttcattggatatttttgtttatggtttgggatgttctaaaattatttggaacttacttggaagagttagcgcttgagaataagaaaacatacataaacttacagaattaattaataggatcctactttgcaattataaagtagcagaattaagtgacaaaactaacagtttagatcgagaccatcctggctaacaaggtgaaaccccgtctctactaaaaatacaaaaaattagccgggcgtggtggcgggcacctgtagtcccagctactcgggaggctgaggcaggagaatggcgtgaacccgggaggcagagcttgcagtgagccgagaccacgccactacacttcagcctgggtgacagagcgagactccacctcaaaaaaaaaaaaaaaaaacctaacagtttgg

SEQ ID NO: 742 - DNA, 105 bp, Homo sapiens
aggctgaggcaggagaatcacttgaacccgggaggccgaggttgcagtgagccaaggtcgcgctattgcactccagcctgggcaacaaaagcgaaactctgtctc

SEQ ID NO: 743 - DNA, 437 bp, Homo sapiens
gaaattaaggaatttagtactaaataattcatgggtcaaagaaatcaccaaaaaattcaaaacatttttgaacagaataatagatcacaacaaatcaaaatttgtggtaaaatcagctatttaacatcccactttagaaagctaggaggaaaatgatcaaattaaaccccaaataggtagaaaaaaattaataacgaacagaaaccaatgaaatataaaacaaacgggaaaaaataataaaaccaaactctaaagagatcaataatgttgaaacgtctttatattgatcaagaggaaacaaattaccagccttggcaacgtggagtccatcttaaaaaaaaaaaaaaaaagaaaagaaagaaaagaaaaaaagcactttctatataaaaaaatttagatggctaaactgtgaattctggcaaacatttgatgtagaa

SEQ ID NO: 744 - DNA, 102 bp, Homo sapiens
agacgaggtttcaccatgttggccaggctggtctcaaactcctgacctcaggcgatccgctcacctcggcctcccaaagtgctgggattataggtgtgagcc

SEQ ID NO: 745 - DNA, 127 bp, Homo sapiens
tttttttttttttgagatggagtctcgctctgtcgcccaggctggagtgcagtagcgccatctcggctcactgcaagctctgcctccaggccacaccattctcctgcctcagcctcccaagtagctg

SEQ ID NO: 746 - DNA, 376 bp, Homo sapiens
ggaaaggaaatgaaggttcccttttccctaatgcctatattgctcaggccagcactcctgaagatgcttgttctgttgaagctccataatgtgtcgatgaccctctttgcatctgaggctgggttaatccccagaggtacaaagacaagtcagggatggcatctgtcttggagatgaggttatcctgaaggggatgtggacattggcacaggggataccagtatcaaatgattggtgttgaacagggagctgggagatcatagaaaacagcctcttccctcatgtgagaagaagggaggttagggcaagacttcctggagaagtcgcctagacggagtcttgaacaatgggtaggacttagatgatgaacgggtga

SEQ ID NO: 747 - DNA, 915 bp, Homo sapiens
tgaggaacagaatagaggagctgtaagttggggtatagtgtggcaaggtttgtgagagacttaagaacaaagggtgtttatcataggtaattatcacagtgttgttagagtgtaggcagagcagctttctaaccaacattacaagtttattttgctagtgaaaccttttatttaccaatgaagcattagaatttcagagagttaattgtttgtgaactttgttcatggtctttctgaaactttcaactctctgtttagttacaataaggctcattttatagcctttattgtcctcttttgagaagaggcagtataggtagataggaacatgggcttgggatcagatagactgggaatagaaatccatgcctgacgcttggacaaattgtttaaacttctgaatgttaatttcttaaccagtaaaatgggaataataatgcttaccttacaggcaaggggacaatttctttgtgtggaataaaaaaaggaaggtaagctgactcattttcagaaagatctttaaaaattaataaacatgccatattccttaatcttatttatgattacatttggtttatttaagttttaccatgcatatctacttagtgttatcaaactataaggaggaagggctcttggtaaaatcagtgagataatctcagagtctgtgctcttaggaaattaataaaaaaattaaatctgataaaaaagatctgttttaatagcaaattcctttttaagactaattgctgtattatctaaaaggaaacaagctgagtgcagtggcccatgcctgtaatccaaacacttcgggaggctgaagcgggaggattgcttgagctcaggagtctgagaccaccctggtcatcatagcgatatttcatctctatgtttttatgttaaaaaaatagctaa

SEQ ID NO: 748 - DNA, 579 bp, Homo sapiens
gagattgtgtttacccagaagatgttcaatgatagtgtgttactaaaaaaatatgggaatgggagaagtttttctttgctgcacccctgtttttacaccacactccactgagaaaggaagctgaaaagcattgaatttgctgttttttaagaaagtaactaagcaaccactaggatataacattttgtattttaatcgtcagcttacatagctatcttcgcatgagagctgcagcacagcgtagtggctaatggtaccctagtgttcgtgtggattcaaagcctgactccattacctacttcttggctgtgtacctttgggcaaattatttaacctatcttagtttcctatctgaaaaatggggaaggagtcttacccattatcttaggtacttttattaaagttacaagaaaattaaatgatataatatctgtaaagcaatgagaacagactctgacatctaataaacaataaatgtatgttgtttgttattttatgagcagactgaaaactcactgaaatgaatcatagttttttgttttgttttgttttgtttcgtttttgtttttgagacaggct

SEQ ID NO: 749 - DNA, 3407 bp, Homo sapiens
gatcctcctgcctcagcctcccaaagtgctgagattacagtgtaagccactgtgcccagcctcgaaatgaatcatgtttatctttatctttgcaacctccctcttcccctggcttgcctatcctcacacagatagcacgtaatagattattaatctcatccatctcggaagatcaggagatctggccaggacataatggtcagacaaggtgaggttcagacctgagggtctaaatgagatgagatagtaaaatataaataattggtagagtatagcctgatttacctccatagggaaaggagagagatgggagtgaggagacctggtacaaattccagatcaaaagtataagagtgggcgcaaaaatgagaaatgaggtcgagaaccggaacagatgagaaatggcctgaaatataaactcatcagcttaggcttatggatgagctttatgtcaggagtgaagacaggcccaaatgtccctcaataaacatatggatcaagcaatggacaccaaagacaaacattgacatgcaccagataatcaatacataacaggtttctacttactggttattggcattctaaggaactttaaaaagggtaaatctgtttaatatattcttttttgttttcttcattagatcccctcagcagagtgtgtttaagaccaaaaaatgtaaccgattcattgagcacctacattaatgctaattatattagggtaagtaaataagtacaaatttctttctggtgacttcctatttggaattgttggttttattttctttttcctagagtagattaagcttggtttaacttgattaccagcaagatttcattttgtttggttttttatcttagtcataatcaacattgttaatgggtcttttatgatgactttcctttcactgtgagtctctggcaacagtgctctatatgggtactctgctggggactgggcattacaaccctcagtaccatgtgctatccttaacttgctgccaaaatacccatggaaattgttgtactagagtcagtgaagccgtaacctgtgttgcttttgtactagcccagctatttcgttgaagatctttcacctacactttcactgcaaggcatgaacttaaaaaccaatatttttgtttctttactccatctagggctacagtggcaaggagaaagccttcattgccacgcagggccccatgatcaacaccgtggatgatttctggcagatggtttggcaggaagacagccctgtgattgttatgatcacaaaactcaaagaaaaaaatgaggtatgatctttaatcaagttctgaatgttatatgtgttctgttgctatagaagagatactgtgttagtaaaattgccatggacttagatttaagatggaaactctgagacatttaaaggctaagtcacttaatacatcccaaatataataagtgctattatcctatgaatgtcaactttctttcagacaagtcaatatacttggcatatacatatctaatttgtacccacaaaagaaataaggggccatgaattatcaccctaatttataagcagataaataaaaccttattcattcacacccaagtcatttttgaacacctactatgtgacaggtactactgtagtcattggggatacaatagtaaacaaaacacaccaagatccctgcccttggtagattttaactttctagtgggagaagacagacaaacaacactacacataataaacttataaatagtgtaatatatgagaagagattaaatgctataggaaagaaagtagagcaggctaagtggaatgggtataccaggcagtaaggagggggtgatggggaattgcagattacatttaataatgcaaagagggtgggcaaggtgagcctcattaagaaaacgagatttgaggacagttacagaaaccaatcaactttctcaatatcttcataataagaaatccaagaaagacagaatttgatttcatttccatactagtagtcttttctaaggatttagcttgcagaatacttattctgtattttgcattataaaaatacaattgtaatattcctgagggctgatatccgaggtaccgctttcattttaggacaacttactgggattatttacagtctaattttaatcagcatttcagtgtttgttttcttgtcaaaaatattgtaccagagcttcaccatgacagtaagaatttaagaaaactaagcattcctttataagcctttggtgattataatccttgagtacagcataatcctgctgctaatggacatcatctaggctcacaaaacagcaatttatatgtgttttaaagtttgtgattttcttatatttttgctacaatagataaaactttttttcctgaactatattctggaaaaatagcatatttttggccagtagataaggttatatactcaattcactacatggcttactaactaaacacactatattctggaaaaatagcatatttttggccagtagataaggttatatactcaattcactacatggcttactaactaaacacacttctatgaatctgatattaaagcctgaggtggcattataaaaataacccctaatattctcagctgtttcccacacagtgtcaatctatcaacatattaagccactgacaattccttcacagttgtttaatatgcatgacatttttatgatagaaaagatttttcaagtttaagaggtgtattctctgtatgtgtacatttgtgcattcctacatagaacttatgtaatacagcagactagataacctgaaaaacctctcactacaaaaccagttacactgtgcagaatatgaaacagcatgcaaagaagagctttgaaaaaaagtaaaggaaatcccagtgcttaataaaaagagactaaaaggcataaaaccagaaaattaaacatattgtaatggtaatacaagaactggagacaaagcctgatcttgcaggagccaggtgttggaactgagaccttacataaagtgagcaccttcaaaggtaacacctccagtaaaaaagtgaacaacggccgggcgcggtggctcacgcctgtaatcccagcactttgggaggccgaggcgggcggatcacgaggtcaggagatcgagaccatcctggctaacacggtgaaaccccgtctctactaaaaatacaaaaaattagccgggcgtggtggcgggcgcctgtagtcccagctactcgggaggctgaggcaggagaatggcgtgaacccgggaggcggagcttgcagtgagccgagatcgcgccactgcactccagcctgggcgacagagcgagactccgtctcaaaaaaaaaaaaaaaaaaaaaaaaaaagtgaacaacaaaaataa

SEQ ID NO: 750 - DNA, 646 bp, Homo sapiens
ccctatgcaacaatggctgcaaagcctgccattccaatgggacaaatggtgcctctttagctttctgaagaagtttggatccctgatcttcatcatgtgaaaaatgggaaacctctgtgtctattgacatagtgattggttgaagaatctccctagagtgagaaaacctcttacacgccaaccagcttctgatccctcccgtgcaccccaggcgggtgtttctaagacctgggggatgcgcaggagagaggcttcagagaagctgagcttccagaaccttgtcacaggatcttcggttccgagggcctttagaacccaagagttgtagagtcctcacattttaaaaagatttttttttcctgatgacgaaaataacatctgactgggatagaaactttgtaacataaaatggaaagagaaaatttctcataattttgccactcggaattaactactattgacattttggtaaatttgtttccatttttaaaaaagcagctttcttgaagtatcatttatgtaccgtaggatttacccaatttgaaggtataattggctgagttttagtcagcggtgcagccagcaccacagtccagtggtcttttttcctttgtgttttaaactcgtggctgaacacatgctatga

SEQ ID NO: 751 - DNA, 646 bp, Homo sapiens
ccctatgcaacaatggctgcaaagcctgccattccaatgggacaaatggtgcctctttagctttctgaagaagtttggatccctgatcttcatcatgtgaaaaatgggaaacctctgtgtctattgacatagtgattggttgaagaatctccctagagtgagaaaacctcttacacgccaaccagcttctgatccctcccgtgcaccccaggcgggtgtttctaagacctgggggatgcgcaggagagaggcttcagagaagctgagcttccagaaccttgtcacaggatcttcggttccgagggcctttagaacccaagagttgtagagtcctcacattttaaaaagatttttttttcctgatgacgaaaataacatctgactgggatagaaactttgtaacataaaatggaaagagaaaatttctcataattttgccacttggaattaactactattgacattttggtaaatttgtttccatttttaaaaaagcagctttcttgaagtatcatttatgtaccgtaggatttacccaatttgaaggtataattggctgagttttagtcagcggtgcagccagcaccacagtccagtggtcttttttcctttgtgttttaaactcgtggctgaacacatgctatga

SEQ ID NO: 752 - DNA, 12123 bp, Homo sapiens
ccgcttcctgccaaacgccctgatcagtgtggactttgctgccaactatctcaccaagatctatgggctcacctttggccagaagccaaacttgaggtcagaggtcgggggtggtcagggctcgggctggggcaaggggaggggctgaggtggaggctgccatcctgtgtgaggcagagacaggtcccgaaggaggccctgcactcagggctgtggtggagggacacccaggggccctaacagaggaggacaactcgggccaggaggtgaggacagagagtgttgtctacaggaattgtggtgaaccagtgaggatgtccccactttcccagcccctggggaaggggagcatctttcaacaggcagaactgcccttcgctgagctgcattgggaggagcaaccgccccccagcataggtgtgcgagagagcagtgtggtgcaggcggggtggggggctgccggggagccgcctccaggacagtttgggggctggacaaccccagtgcccttccatccctgcgtctgccatctcagtgactctctccatctgtctgaggacccaggaccactgtacacggccccatcccacagacagaggctcaagacgggccacacagcaaaactgagctgtgtctgtcacagatgacccttgttccttgtcttccctccttctagtatgttgggtccacgagggcagggtctgtctcattggtcatgtccactgttatgccctcagtctagaacagctctggcatctcatatatatatttatttatacaccttttatatatatatgcatatatctctatttaatatattatattacataatatattaactatatatttgctgaatggatgagggccacctcctctgagacaggccctgtgctggcactagggccaaagaggcaggcagagataggccctgtgtttaggaagtcctaggaactcagagccaggctgcgtggggttgacaggcagggatgaaggggccgcgagtcaggcaaggactccagggctgaaagggtcaggggtcaactgagaccttgaaaggcgtggaggggcctctgccaggggtcaggaaatcctatttctcccgctagcttatgggaccacctgtggtggggcacggccccttctggtccttggttctgtcagctgtgtaggcaacatctgaggtgcttctaactctgtacccttgagtttggatggaaggagagcagcctgggcaagggtttagaggctcaccagttgagctggcgcagggcctggggagcccaggtgggtgaggacctgtgccttgacccccaggtctgtgtacctgcacaacaacaagctggcagacgccgggctgccggacaacatgttcaacggctccagcaacgtcgaggtcctcatcctgtccagcaacttcctgcgccacgtgcccaagcacctgccgcctgccctgtacaagctgcacctcaaggtgggcaggggaggggtaaggaggggcacagcagaccccacagccagggcactggggcaggggcctgcaggggaagagctcaggcccacatggccacaggtgctgcccaagtggggccccggggctgacagcaaggagtctactgtggagaagtgggcagaaacccgggcacctggccagtgggttgtgtgtggcgttggtggccccacacctgggttgcttcaggtctgggtgccttcctggtggcttcccagactcctctccacacctcatcccgaggccctgaccttgccctcggccctccctcacaatctcctcccttcccttccatcccccagaacaacaagctggagaagatccccccgggggccttcagcgagctgagcagcctgcgcgagctatacctgcagaacaactacctgactgacgagggcctggacaacgagaccttctggtgagtccttgtctcaccaggtccttggcgtgaccacggggcccgggaagctccttcagggccaaccatccagcccagcccagcccctcacgcacgtcccctgcccaccttccctggagaaggaactttaagccttgtgcctctgttgacatttctgtccctgggaacaaggactatgtagaagtaaggccttccaagattccagtgaggcaaagaagcgttggtggaggctggcttcttggtgcgaaatacagactcgggcattcttgctgaaggcaaatgcattttcatttttctaagggaccagggtagccataaaaggctatcaaaaggttaaatagtggtcttcaagtaaactcctgtgtgtcagaaaatgccggatccttcctacaccagaatatcattgagtcaacccaaggagcaaggactgagggcccacagtcagtgagcagcagagctgggaggagctagtggcaattccccagccacatctcttgggaatcatggtggaaacgagcacaatgtgggctcttgccaaccgtcctaattccctccctgccccaggaagctctccagcctggagtacctggatctgtccagcaacaacctgtctcgggtcccagctgggctgccgcgcagcctggtgctgctgcacttggagaagaacgccatccggagcgtggacgcgaatgtgctgacccccatccgcagcctggagtacctgctgctgcacagcaaccagctgcgggagcagggcatccacccactggccttccagggcctcaagcggttgcacacggtgcacctgtacaacaacgcgctggagcgcgtgcccagtggcctgcctcgccgcgtgcgcaccctcatgatcctgcacaaccagatcacaggcattggccgcgaagactttgccaccacctacttcctggaggagctcaacctcagctacaaccgcatcaccagcccgcaggtgcaccgcgacgccttccgcaagctgcgcctgctgcgctcgctggacctgtcgggcaaccggctgcacacgctgccacctgggctgcctcgaaatgtccatgtgctgaaggtcaagcgcaatgagctggctgccttggcacgaggggcgctggtgggcatggctcagctgcgtgagctgtacctcaccagcaaccgactgcgcagccgagccctgggcccccgtgcctgggtggacctcgcccatctgcaggtaagcggaagggagggggctgagccatgcccatggaggggggtactggcatggctgccctgagcccacctgtctgaagggtgaggagaagggctgggtggtgagggaggttcctctggtatggccaggctgagctcattcaccttcaggtatctgctggagatgctggctaaggcgaagctaggccttaggggaggcaggaggtgggtcaggcagagggtgtggctggcatgccagggtgagcccagcccacctgcaggtacaagagtgaggggcagagtacaggtggtatgaccgagctgagctcatcacctgcagatacaggtttgagaagggctgtggaggtaaggaaggtcatggctgcaggtaggggccctaggctcaggaggaccgggggccagttcgggtggtatgtatgggagagtcaagctcacccctttgcaggcacaggagtaggtatgtggagaaggctgggctttgggatgggaggcagaggggacagcctgagctgtgggcccacctcaccagtctgcagagggctggaggtggggatctactcatgctttctgaggctggccagtcgatgtggctgctgtgaccacatggtcagaattaggcagggatgcctgggcacatagttcactttggtaacaaaacccccaactcaaccagtgtgggtgaaagagaaatccactctatacgctggctcatgcctgaatctcagcagttagagaggctgaggcaggaggatcacttgagcccaggagtttgaggcttgcccgggcaacataatgagacctcatctctacaaaaaaataaacttaaaaaaatttagccccgtgcagtggcatgcatctcaccctggggggctgaggtgggaggatcacttgagcctaaggaagatagagctggcagtgagctatgatcacgctacagcactcaatcctggacgacagagtgagacgctgtctcaaattaaaaaaaaaaaaaaaaaaaaggaaactcatcagagaacctgggagggagggtggggtgctgccagtttaggcactgcccagtggcttcagcggctccctgtgggaacccactttcctgactgccctcccctggatgccaggcatgtgatgatctgagacagaatggcctggggcctggctgttgtgctggggtcactgtgggtctcacaccgttgctcctgacctctgcacgtgtggcccctgaggtccataagtgagcagtcccactcaagcagctcccactgcacccatccagggccagtggggtgagattcagagtctgggggatccctgggctctgcccatttgagatctttgggaatgaccaagtctaatgggaatgacaagtgtgtcaggagataggactgtgacacccaaacatcttggctgtgggtttatgtgggaaggcacaagaagctgggtaggacgttcatcaattagaataagggtttggagtcaggcacacccggctacagccttttataggttatgtgaccttggaaagatcacttaacctctctgagcctctatttcccaatctgggaagtggggataattatagacaccccccctcctccacacagggttattgttagatttagataggctgggggcttggtgggagttttgtaagctgttaagtgctttgcacaggtgggagtccctgactcccttggtcacccctgcagctgctggacatcgccgggaatcagctcacagagatccccgaggggctccccgagtcacttgagtacctgtacctgcagaacaacaagattagtgcggtgcccgccaatgccttcgactccacgcccaacctcaaggggatctttctcaggtaggagcccactcgcggccctgtacacacccccgtggggcccaccctggctccaacgggacagttgatgcacgtgggaacagcttggctccactgctgcctgtgtaaccacggctcagatctcaagggtggggacagtcctggccaggcccgatatggttcctaggtttgtaaaagggctttggaaacgttagaagccagtgcgcatgggcgttgtgaatgttactgtggcagaaaggatgctggacagcatcttcctggtttgcagctgagagagctgaggccctgagagcacaggtgactgctgtgtctgcagccatccaggctgggtccgggcctcacactcaggaatagatgttcaggccctccctggcttctggggctaagagatggggatttggagtgattcgggggatgcagctccctgaggatatgaggggcttccatgcagcagagccagggtggttcttcccagcacttcccacaatccctgcccccaaatcagagagaaggagacaaggcagagatgagtgtgctcccaggagctcggttgcccagaaagccctgggctcgatgatatcagggtggcttgacatgtgcctcaggcatctgcagggtagctgaagcacagagagtgaggggcctgagatcagagccacagcctccacctttccacccctgagtgtggccctggcctggctcagcgctggccttgcctttgtgccactccacatcaggcactgcggtgacccctggctaccgcagcccaggagcctcaggccttggggttaatgccagggatggcatagagacagctcccaaagttgtggcttccaaaatagcagtgagagtgtgcgcagagagagacccctcactttgcagagactggcccagagccagccccaccacaagctgcagctgccctgaccggcctgtaccttccatcatgtactgcgctctcagcccctggcctttcccgcctgctgcaccactttccgggagggccattccctcccctgttaccttctggagaggccagtcgggggaagggagggttccttgggggttgggctcctggcattgactgcctcgatgctcacacaggtttaacaagctggctgtgggctccgtggtggacagtgccttccggaggctgaagcacctgcaggtcttggacattgaaggcaacttagagtttggtgacatttccaaggaccgtggccgcttggggaaggaaaaggaggaggaggaagaggaggaggaggaggaagaggaaacaagatagtgacaaggtgatgcagatgtgacctaggtatgtggcctgtatggggcagcactcacttctgctccctgcattttccccttcctgaccctggtagagggtctttctgtccattcttcaccctctcgcctctgcttcatccacccatttagcaaatttataagagcacttgggatgtaccaggccgtgggtgaaaggttgaagcctacgggaggcccacaccttccagaagattctcacccagcatgagggtgctgtcacgggagtgaccggggggcactggacatgtgggtcggggctcaggagtgaggtctggtctggagagagggatccaggcattgttagccttgaaacaatcactcaagctgcagggggctggggaagcttgccatgggagagtgagtgaggggggcaggtgactgagacagagcagttaggaaaggaggtaggaaaaccccagactgccgtgggcagagggcatttgcacatgtatgtaacacaggcacctacatgtgcacatgcacacaaatgcacacggatgcaccaacacacatacattcatgtgcacacacgtctcaacatgtacacacatccacaaaccatgcacaggcagaacacacacaccacacacatgcacacagacacacatacatgcttgtaccccatgacacatttgcatgcctagactatgtacatacgtgcacacacgtgtgtacatgcatgtgagtacatgcacacaaaacacccatgcgtacccacgtatacgggcccttacatgcacacctgcatgcacacatgtacacatgatgcgtgcatgcacaggcctgtctagaagtggggacttggctgtgtcagtgctgctgaggggctgagggaactgagcactgagggagctgaccactgcggagcgcccactggatttttccacctggaggctgtctgtgactttgtagcagcaggggaagctgggatgagaagagcagctggaaaggaagtgggtccaggcactgcagaccagccttttgagaagtttggctgtgagagatgagagagggcagaggtgggaatggagtgtgaagttcaggaaacgctcattttctgagcctcacaggaagcaaaggcctctcgaggggagccctgtgtgaggggctctggcaagatgccccgacacacacatgcatcttccacacgcaccctcttaaaggagggggctggcttgggtgctggtgggaagaggctggcctggagggggagtcaccgatgtaggaaagagctggctttgagggcccctgtgggaatggtagaagttgctggctttagcaggaggaacaaagggcagggtggctgctgtcacaggcagattggtggcttggtggccagatgtgaagccatgtcagccggatccctccagtcttccgttttctctgtgcagcagggaggttctccgcagaccaaaggtatggagaaaatggacaggtggatccacccacagctgagtttttcagccaagagttcaggacaggagggcaaggaacaagggagtgtgttggccggaggctggctgcaggcatgggtcctggggtcaggttgggtagggaaggaggtgcagataggagggctggtgggcagggactcagagaaagacattggagaggagccaggagcggctgtgtggtcggaggagagaggagagctggtgaggagtgagccaggctgggggtcacagggccaggacgtagccgtgggaggggctgccgggccactgttgagtgttgactgaagtagggcctgggacgaagaggaaccagagggggctgttgagggccacttgggtgggtgacagagggagctgggagaagggcgcaagttgatggtgagagaagagtgtgcacagagttgggtatccgcaagtgtggaggggctggcaagaggctgagcttgggggtcaccttccccagctcccagggcccgggagtatgaaggtagagctggttctctgaggtgttgtcctcacacagagttggggtgggtgacagggtgactggccatccagtggggacaccacagccctcatgaggggctgtggagtcctggggtgggtgagaatctgccccatctcaggtcagttgagtggggctctgggagaagccctggggagtggctggtgggacccaaaggccttctggcaccccgctggctctgggctcccagggccaacgctccctccctactcatagtagcctggcctttccagagccccctccagcagggctccccacagcaggtcccctcaggctgcttgggctggtgggtctgccctgagctggcccctgactctcttacatgttccacaggacgatggaccgccggactcttttctgcagcacacgcctgtgtgctgtgagccccccactctgccgtgctcacacagacacacccagctgcacacatgaggcatcccacatgacacgggctgacacagtctcatatccccaccccttcccacggcgtgtcccacggccagacacatgcacacacatcacaccctcaaacacccagctcagccacacacaactaccctccaaaccaccacagtctctgtcacacccccactaccgctgccacgccctctgaatcatgcagggaagggtctgcccctgccctggcacacacaggcacccattccctccccctgctgacatgtgtatgcgtatgcatacacaccacacacacacacatgcacaagtcatgtgcgaacagccctccaaagcctatgccacagacagctcttgccccagccagaatcagccatagcagctcgccgtctgccctgtccatctgtccgtccgttccctggagaagacacaagggtatccatgctctgtggccaggtgcctgccaccctctggaactcacaaaagctggcttttattcctttcccatcctatggggacaggagccttcaggactgctggcctggcctggcccaccctgctcctccaggtgctgggcagtcactctgctaagagtccctccctgccacgccctggcaggacacaggcacttttccaatgggcaagcccagtggaggcaggatgggagagccccctgggtgctgctggggccttggggcaggagtgaagcagaggtgatggggctgggctgagccagggaggaaggacccagctgcacctaggagacacctttgttcttcaggcctgtgggggaagttccgggtgcctttattttttattcttttctaaggaaaaaaatgataaaaatctcaaagctgatttttcttgttatagaaaaactaatataaaagcattatccctatccctgcagcctgtggctatgtctgtgcttgcttcctgccaggtgctggcctggtgccgggtggagggggcaggatacaagcccctcagcgccctggccagaacagcagacatcagtggaaagtccagttctcggggcccgcagagtagctgcacaggcaggcatcctgggagaacagggcatagcctcaggcgagggggcctgaggtgtgtgcagatggcccactcgggaatagtaggtgaggcctgaaccagcacacgcggcctgtgagcttgctgtgcattcccagaggtggagcatccaagcaaaggacctcatgggctttgggcctgttaagggctcacctggagggtcatgggtcacctttgcactgacagggtgttactagtgggttctagaggagagcaggggactggaggcaggcctgggagctggagcagagccgacttgggggcccaggtctccgcagacctttccaggaaagagctaacagatgcacccagtgtgcttcccaccccagtgggagagctgccaccgggaggtggtacccagctctgagctaagaagagcctctgatgggcagagctgccccactgtgggttgagatgctcgggaagtggtgacctccctgctgctggaggtgtgtaaggatgctcctgccaagtccactaaagagcagactcctgccttgtgctgggacagactcgattgctcaaggggtcttagagatgtgacacctagaaggggctgctaagcttgtctgcatgaaggtgggatgaccgattgcatgacatctgacctctcccaggtgaggaggcctcagggaaggaaggatgctctcgtggaggcctgcagcccccagccctgcagtgggaggaggtgtcctggggtcgtgctcttcccagactcctcacactccacccctgggaggagggtggaaggagttcaggaatggggcagtgggagcaggtgccctcttgacgctgagtgacctgggggaggcctgtcccctccctgggccttagtgtcttcaagggcatcatggtgcaagcccctccagaccccagagctgtatcttctccccaaggcatatctggaacaggctgtgttgccagggcccttctgtgtgccctgcaggcctcctggaggcagcctggggtgtgagaatgagggagaccatctggaaatgtccctgggcacgcccctgtctaaagcaaagcattcaccacggggagccagactgggaaggaaatctgtttcttctttggggactgatctcaaggccctgcctgcagagcagagcctagaccatggcagagaggtctgtccacactggacgatgcccagctgccctgtggttattgagacaggctcctgggtaggctagcttatactctgtcttctgcatgtgacagctcagataggactgtccttactgcagccaccaggacaggcttctctgcactctggctgcccatacaggcctgtccacacactggcagcctagacagacctgtctacactccagccaaatggacaagcctgttagattctggccacctgcataggcccgcccatatcctggctgcccagacaggcccgtctgcactctggccgcctgtattaattagcccagtagctaatatcatatttgctggctagcataaggtgttgaagcccacaagaagtgaaaaacaaaatacctttatttagttaacactgaatttgcaaacacagaaaggaatagaaaacctgactccacttggacgcacaggcctttggggagttctgacaccagggccccatcggcagctccaccagagcatcctggctgcacctccttcccggagtcctggcttgcctacctattccatgggaggttggcctggatgtgtcaagggggcctttcagctctagtaaagacatctgtctccacatccaaggagctttgcaaaagacacgtggcaggacaggagactggacgcactgtggcctggggaaggcagcggggcttggccctgggctgctccccttggggagaactgtgtggctgaggccacctgttatggggtggggcctgggcctggacacagctgcaggctgccctgtcctccaagaggagaggcggggcttgaaagatttgagttagtgtcttgaccttaacgtgagaccttggacaagtgttttcagctctcagagcctcaagtctgtcatccagaaagtggggccggataacccctgcctgccgccctcaccgggctcacaccggggaaactgtcacagcggggcctcaggcaatgccgggcccatcactccctagatggggctcccccatgcagcctttcccttctctgagatacattttccgtcaagcggggttaattccagcctctcaagggtgagaagaatgtgtgatcctggcccctgccggctgctcaggagggttggagagtcgagttcctgcctcaggaccctgcccctggaggcctcgcctgcccctgcag

SEQ ID NO: 753 - DNA, 472 bp, Homo sapiens
tcccgaggtgaggggccacccagagcccagggtcagggacaccaagtggggccttgggggcctgaacgatgctgggtgcccagggggagagcttggccctgcggatcttggggtgtggatggaagagagcaggcccgggccaggctagcagtggggctgcatgagaaccagctccacacgggcaagggggctccctattgttgcctgaacactacacggatatttctttctttttttttttgacatagtcacttactttaataacaatacatataccatgttatcaccatggaatgtaaattcaggttagacaagagaatttcacaagtgtaataacattctgtagtatataagtttgtgtatactgtctggccaaaccagcatatgctcataagtcattcatcaattccattacaggtcatttgtttagttgaatgtttataagcaaaataaaataaaataaataaaaaat

SEQ ID NO: 754 - DNA, 670 bp, Homo sapiens
ggagaaagagaaaagacaagactaaaatgagtgtggccatgtatcccatcttactgccttcaagaagtcctttcctgtaaaccttttttttgattgttcttgttgttctggtaagggagggcgaactgggtttgattctgagactgccacaagcctgtctctttttttgtgttgtactgactcgatccttgcttcacgctacagatttctcacagtgggtatttttagttgaggaggaggtttctcaaaaatactttgccgatgtctggtcatgcacaacccctgggcatccccagtgaagtgctttgagtcatggccccttaagggcagagaggatgtgcatttggcccatggtgtgctttgcctggacgtgtgtcatttcccaaaatatacaggaggagaaccagattagtaaaaggaaaccttgtcacacatggtagggttctgctgccccagaatcaacctttacagctggaaaggttcagcctttcttacttggaagggtcatattcattgaactgcagttaaaacagtcttaccaatagataggtagcctcacaccagaaatggggggcaaaaggcagaatcactaaacatttaagcaacacatgagtaaaaatatttggcctctttttttctttgtttaaaatatgcaaaggtggccgggcac

SEQ ID NO: 755 - DNA, 410 bp, Homo sapiens
tttttattatttccccaatctttcacagttgtctcaatcatatctaattcaatggcagatttcctctagtgacttactttcatttctttaattttactaaattttcatacaaataactattttcacactcatattttatgggccaacataatatttaatttctgtaattacaaagcaagtatagctgacattaacagtttatgcagagagagctgatgtgctccagagttcgagagagaacattcagtattcgtttgaccacagtattggtcagtatattttatacaggggatggagaatgctgattgatccatccagttgattagggcccattggttaaaagactttctattggataggttctgaactcctcccaaaaattcatcagtaaaaacccgttcaaaaagcag

SEQ ID NO: 756 - DNA, 325 bp, Homo sapiens
tcccaccggtcttcttttttttttttttttttttttttgagacggagtctcgctctgtcgcccaggctggagtgcagtggcgggatctcggctcactgcaagctccgcctcccgggttcacgccattctcctgcctcagcctcccaagtagctgggactacaggcgcccgccactacgcccggctaattttatgtatttttagtagagacggggtttcaccgttttagctgggatggtctcgatctcctgacctcgtgatccgcccgcctcggcctcccaaagtgctgggattacaggcgtgagccaccgcgcccggcccccacc

SEQ ID NO: 757 - DNA, 529 bp, Homo sapiens
ccttatcctatcctccaaccatttcccgaaggacaagagccatggggctaacccctgacatagactgccatcattttaccagggacattggattgacaaggtttctagttgttgataagcgcagacattctgctatctgcctccttggtagcctgccaactattcatgtgcttcttggaaaaggaaacttttccaaaaggcagggacttcagagggctggtgagacagtgtcctgtcattaaagcttcactagagattggcattcccaatattagcatcatgttgctatatgctataaaggagacaaagtactatcttttctttacccattgtaagtttcactgggacccctgtaacaaaagacagattgggccaggcgcgatggctcacgcctgtaatcccagcactttgggaggccaaggcgggtggatcacgaggtcaggagattgagaccagcctggccaacatggtgaaaccgtgtctctattaaaaatacaaaaattagctgggtgtggtggtacgcacttgc

SEQ ID NO: 758 - DNA, 529 bp, Homo sapiens
ccttatcctatcctccaaccatttcccgaaggacaagagccatggggctaacccctgacatagactgccatcattttaccagggacattggattgacaaggtttctagttgttgataagtgcagacattctgctatctgcctccttggtagcctgccaactattcatgtgcttcttggaaaaggaaacttttccaaaaggcagggacttcagagggctggtgagacagtgtcctgtcattaaagcttcactggagattggcattcccaatattagcatcatgttgctatatgctataaaggagacaaagtactatcttttctttacccattgtaagtttcactgggacccctgtaacaaaagacagattgggccaggcgcgatggctcacgcctgtaatcccagcactttgggaggccaaggcgggtggatcacgaggtcaggagattgagaccagcctggccaacatggtgaaaccgtgtctctattaaaaatacaaaaattagctgggtgtggtggtacgcacttgc

SEQ ID NO: 759 - DNA, 529 bp, Homo sapiens; identical to SEQ ID NO: 757

SEQ ID NO: 760 - DNA, 625 bp, Homo sapiens
cctacattcctggataaggggctcccataaactcaaactcttgaaagttaaggaataccgaaagacattttcttttttgcacagttgttcctacaatcaagctccaaatcacctggtctgattttacatgtactagaaggatcacatgggactcaaagtttgtaatctgctgatagcaaataggactgtcagatggtatgggctattgcacactaagagctctcatttatgaatcactagctaccagatacttttcagagtactgtatatggagaaatctcatttacccttaacagcacccaaatgtaatatgtatttctagatatcaccattttacaggtgaagagcatggggtaagtgatttgaccaaggtcacatagaccatgaggggcagagacagcactgaagcttaagggtctcctttagatctcatacacataactttcctgctatgctggttgtcatacacttaccatcttaccagtcagaattctcagtaaacagctttctgagtacctgatagaaaatgttagtacagagccaggttggtgcagtccttggacaccatcctcacccttcctagtgtccccagtctctaactctaccggaggtcttcctccctgag

SEQ ID NO: 761 - DNA, 625 bp, Homo sapiens
cctacattcctggataaggggctcccataaactcaaactcttgaaagttaaggaataccgaaagacattttcttttttgcacagttgttcctacaatcaagctccaaatcacctggtctgattttacatgtactagaaggatcacatgggactcaaagtttgtaatctgttgatagcaaataggactgtcagatggtatgggctattgcacactaagagctctcatttatgaatcactagctaccagatacttttcagagtactgtatatggagaaatctcatttacccttaacagcacccaaatgtaatatgtatttctagatatcaccattttacaggtgaagagcatggggtaagtgatttgaccaaggtcacatagaccatgagggtcagagacagcactgaagcttaagggtctcctttagatctcatacacataactttcctgctatgctggttgtcatacacttaccatcttaccagtcagaattctcagtaaacagctttctgagtacctgatagaaaatgttagtacagagccaggttggtgcagtccttggacaccatcctcacccttcctagtgtccccagtctctaactctaccggaggtcttcctccctgag

SEQ ID NO: 762 - DNA, 625 bp, Homo sapiens; identical to SEQ ID NO: 760

SEQ ID NO: 763 - DNA, 488 bp, Homo sapiens
aacaaaccatccactcagcagctgcgggcctttcccgacccctttctcagctcccctcccctcccctccgagctctgagaatgccatggccctgtcacatggaatcattaaccctggagtctcctgatggaaccgcctcagccagcccactgtcctcctccttcatgactcagttcaaacatcaccttccacatgaggagcctccagcttctgcgggcagaggggcactcacccaactgtgactacagcacttacacaagccaccaactggcacccacagcacttatcactccatgtgtctgctcaaccagcctgggtaaggaaccctaccctctctgtctctgtccacctccaacaggccatggtgcaccctgcatgggggctgcctcatgggggtctccaggaacacctgctgagtgaatgcgtaaagagtccttggctgctgcacactgagctcacagttaactaaatgctagaagattttgtaa

SEQ ID NO: 764 - DNA, 488 bp, Homo sapiens
aacaaaccatccactcagcagctgcgggcctttcccgacccctttctcagctcccctcccctcccctccgagctctgagaatgccatggccctgtcacatggaatcattaaccctggagtctcctgatggaaccgcctcagccagcccactgtcctcctccttcatgactcagttcaaacatcaccttccacatgaggagcctccagcttctgcgggcagaggggcactcacccaactgtgactacagcacttacacaagccaccaactggcacccacagcacttatcactccatgtgtctgctcaaccagcctgggtaaggaaccctaccctctctgtctctgtccacctccaacaggccatggtgcaccctgcatgggggctgcctcatgggggtctccaggaacacctgctgagtgaatgcataaagagtccttggctgctgcacactgagctcacagttaactaaatgctagaagattttgtaa

SEQ ID NO: 765 - DNA, 488 bp, Homo sapiens; identical to SEQ ID NO: 763

SEQ ID NO: 766 - DNA, 322 bp, Homo sapiens
gcatgcacttcacagacccccctggctcgggtctctccttccagtagcattctgttaatgtataacatataaaatatgggcctgaagtcactgaagcctgaatttcaaatctaaaaggaaaggtcaccatcaaccagcttcagagacatcctaggctaacatattcatggagacgtccaactatctttcctgtctcaccccatcttgttcttgtgctcctgtccccatccgacctttatgccagtcactgcagggcagctggcatgtgctctggaacccaggccctgtgcatcatccacagagcagcacgccggagccttgc

SEQ ID NO: 767 - DNA, 322 bp, Homo sapiens
gcatgcacttcacagacccccctggctcgggtctctccttccagtagcattctgttaatgtataacatataaaatatgggcctgaagtcactgaagcctgaatttcaaatctaaaaggaaaggtcaccatcaaccagcttcagagacatcctaggctaacatattcatggagacgtccaactatctttgctgtctcaccccatcttgttcttgtgctcctgtccccatccgacctttatgccagtcactgcagggcagctggcatgtgctctggaacccaggccctgtgcatcatccacagagcagcacgccggagccttgc

SEQ ID NO: 768 - DNA, 1435 bp, Homo sapiens
ttccagtacacactatacaggctgaaaaacctaaaatgttcactatctggcccttcaaagaaaatgtttgctgacccctagtataaatcatgatccatgttattcaagaagcaaagatcagaatttcctttgtataaattttttcctctcatctttttaaagttctattttaatatatgtttttaacataataatattaatgcagtagtcacatatataatttctaaatttaaaaatgtgcatacactgggaatggtacatacttaatttttttttttttttactaatataggtggttcatttaaaaaaaaaaagttaagtcttaggacaagctttagcatttaaatttagtaatcaacgttattagcaatcaatgttattacatgaataactgagttctgtgagtgcttcaaatcacagagaaagaggcccagaattaaactttttccaaaatactcaaaacatctctggagaatctttttctggtgctaaaaatgtcattgaaatgatgcaggtagtactaatattcttcaacagaatgcaataaaatacgagctacataaatccaaacttggttcaaaggtagctatgtttttttaaaaaaggttattataacagacaaagcaaatgcaaacttatccttccaaaccctgataattggtaataccaaataactggtatctaataaatatacaaatcaagagaataccttgctagctaaattaaaaaaaaaaaaaaaaaactatccatacttaacaaccaagtgcaattttgtaaccaaagtgttccttagctatgatagcaaggctatttcggtctaagacaacagatactaacctaaagctgtgaagagccccaggaaataccgagttcctcacttacagatcttaagcttagcaaggtggttctactaactcaaaagctggggtctgataatcatcatcaaccaatttataagctcaaagttaattaccaattgaacctggatttatcagtttagggttgtcattctatgttgaatcagattctccaacaaatagtcatagcccccagagagaactacactctactctgctcacctttaaggctttttctgaggccttccgagatgactagcatcagacttttgaggaaggctagccattagacaaggcttttccccacgatctgactgcttgaagtgacatccaggatcaggtcgatcctgtatccaggaatcatgaccctccctgaggcaccagtcatcatgagacagtcagtgcactttagcacttcttgaaaaccactgggctgctcctttagctgaaaggaaaaaaaacatcaaaaccacaacaaacaaaacaaagggggaaaaatcagtaattcaatctgaaaagacagagcgtggggaaaaatataccaaaacagccttgtctagatcaaaatgcagccttgc

SEQ ID NO: 769 - DNA, 432 bp, Homo sapiens
gctaaatagcactccaagtttcttaattttatgtctggtatagttcaacctacaatcatgtcctcttttatgaggaagtgaaaacagatgaggtgccaaaaaaacctgctctttgtatagtccacgctacttctttctaaaatgcaaatctaataactttctcctctactaaaatctcttcaatccataaggttcccatctgtaaggttcaatctataaggttttcatcaatctgtaagacaaagtcgaaactccttggcagagaatataggacgtgccatgccaatctatctagtctcatttcctgctgctgtttttcttgaacactttgccagctatcaatactgaggtacatacagttctcccaaactctcttcagtgacctttatgtctttgcatacatctacttcacaaacttgaattaacctttca

SEQ ID NO: 770 - DNA, 5495 bp, Homo sapiens
ggtgacaaaaaaagtttagagggagatttggaggatctgaaggatcagattgcccaggtaaggtcaagcctactcttgagccgtatgtgacaggttaattgcctcatctgccttaagccatagtttgattgattgattgattttcaaatgtattttatttttgaaattttatatatttgttttctgatggtttacttgaagaaaagtcttgaggtagctaacatgcaaaacattatcacctcccaggcattatatctggattggccagatcttgtggttcccttcttcttccctattgtgcacacactcattctgtctctgctctcaaagcctattttgttagttaggaaataagtaagaaaagagatgccaaaatgctgctctccacacaggaaaaaatgaaagtggttagctaaaataactagtttgatttttgaaatgtgagtgagtcatacgtctctgttctattccctgttgccaattaacaatttgactggtcgtttggtatgatactctgtgggtgggaccagcaaatgaatacccagttctgtgataaatgttaagatgaagtaattatacattgataaatatataggaattttaacacttgatttgatttgattcatagatatcttatgttcattattaaatgattgccatgtaatttttatcacaattctttttccttgtaatagttggaagcctccttagctgcagccaaaaaacagttagcagatgaaactttacttaaagtagatttggagaatcgttgtcagagccttactgaggacttggagtttcgcaaaagcatgtatgaagaggtaactatatataattttgctttgtaaaggaatggaggggttctagaatgactttgtcatagctaaacatgtaattatattttatttatgatttctttgccacaaaaatatatcagataaagaaataataaggtttggggatggggagaaattttgcaggtagattattcaagctactgctgctaaaagaccgcatttgagaactcaagctgttaccgtaaacagatatgatttcacttcatcttacttatttttgtttttttgtttttgtttttttgagacggagtcttgctctgccgccaggctggagtacagtggcacgatctcggctcctttcaacctctgcctcctgggttcaagcagttctcctgcctcagcctcccgagtagctggaactacaggcgtgcgccaccacgcccagctaatttttgtattcttagtagagacgggatttcaccatattggccagggtggtctcgatctcctgacctcgtgatccgcccaccttggcctcccaaagtgctgggattacaggtgtgagccaccacatccggcctcacttcatcttaacttataaaggcttggtcacagcagctaattactgtcaacatgtttaagcattagttatctattcctgcctaacaaattacttccaaagttcatcaacctaaaaccacagacttgtattaatttcttagttcctgaaggtcagaattcagagctgctaaactgggtggttctgtttcttggtcccatgaggttgcagtacagcttttaacctgggctggaggaatggcatctgagctctttcacagggctgtgggcaggacgtgtcagttcctcacctcatggtcttcttcatagggctgctcatgatatggcccccctaagggtcagtgatgagaaagagagagagagagagaaagaaacacaacgagaacatgaatacatgctaccagctaccaaggcagaagccagattgtcttctataacctaatcacagaggttacataccatcactttggccttctcctatggctcacatctggaaatgcggctactcacagcatttataggcgtgtaaatttttttttttttgagacacgagacccgctctgtcgcccaggctggaatgcagtggcatgatcttggctcactgcaacctctgcctcctgggttcaagctattctcctgccttagcccccctagtagctgggactacaggcgcatgcacccacgccctgctaattttttgtatttttaatagagacgaggttccaccgtgttagccaggatggtctcaatctcctgaccttgtgattggcccgcctcagcctcccaaagtgctgggattacaggcgtgagccagcgtgcccggctcactcatgtggaaatcttaaaatatcacttataagccttaactgctgtggtcaaggggcaggggcaaaacgcgttgtcaaacaaaggaagtaataaaattgaggaaaggggaatgtatatttcatgaaaattgtagaggggttgaaatcaactcatgggggagaacatgctgttaatgtgctaggcttaatgtttttagaagtagtgtaattttgaaaacagtgcaaataggaattcattgtagcagttagcaaaccagttttttagttggaggaaaaataatagaaatctgattattttttaaaattacaggctttaaacaaaatagatattagtgcaaggtgcaccagacaagcagtcagaccttggacaactcttagtgtcagtttcttatttaaaatgaaatactaatactgctatttttttcttcaatgagtggtaaggatcaaagtggaatactgtgtgtgaaaactctttggatactgtagcaagtgctgtcatataattgttactaagtgttgctttgttaaagcagatattttgatatgaggttgacttacatttttgttttgttttgtaaaaattgtgatttatcattacttatttctgatgttgtgtgtagacaaccaggagtagggttttttttctttgtaaggtcactggttctatataaaaaatagcatcagtaaaaagtaatttaatatttttagagtgcatagcatctttgaatttttggcctttgcctttttgagaatggatgttaagatagtcctcttcagttttgtttttgtttttgttttttttaactctttttggagacagagtcctgctctctcgcccaggctggagtgcagtagtacgatcttggctcactgcaacctccacctcctgggttcaagcgattcttctgcttcagcctctggagtaactgggtctacaggcatgtgccaccatgcccggctaagttttgtatttttagtagagacagggtttcaccacattggccaggctggtctcgaactcctgaactcaagtgctccatctgcctcggcctcccaaagtgctgggattatagttgtgagccaccgcacctggccttttttactttaaaaaaaatttttttgtgtgagacagagtctcactctgttgcccaggctggtgtgcagtggtacggtcttggctcactgcaacctgtgcctcctggattcaaatgattcttgtgcctcagcctcacgagtagctgggattacaggttcacaccctcacaactggctaactttttttttttttccttactttttactaagtaataccatgttggccaggctggtctaaaactcctggcctcaggtgagccactcgcctcagcctcccaaagtgctgggattacaggtgtgagccactacgctggccttaactttttttttttacattcatgatatatattcagtaataatatctaacttccttattatgaacagttgggggaaaaaaggaaggagaaagacgaaagaggaaggaggaggtagacaaagaacaaaccattagcagtcactcttcagtatttttgtgatttaggtattatttgcttcatgaaatagatgtgatctctgggaaggtgatagcagaatcctcctgatttttctgatttttcagattttgtcaagtgcatgctcctgtgtagtagttaagagaaagatgaagaaatgcaaaggaaaatacatgcgctaatatacacaaacagcaactttggtgggttatacttccctcttgtggcttcttcagatattaccattctaattattatttttttttttttgagacggagtccagctcagctgcccaggctggaatgcagtggtgcgatcttggctcactgcaaccaccgtctcccaggttcaagtgattctcccatctcagcctcctgagtagctgggattacaggcaccctccatcatggctgactaatttttgtattttagtagagacagggttttaccatattggccaggctggtcttgaactcctcacctcaggtgatctgattgccttggcctcccaaagtgctaggattacaggcgtgagccaccgcgcccagccttccattctaattttatttagacacttccttaaaacagagtaaaggaaaggatcatgacaactacttctattcttcaatggtaaatttttcataaatatttgagttagtcaactaatattgttaataagatcctgtgtcacttgataatgatagcttaataccggcttttaaagaagtcatgtaaattagcttgtgctgcctattattatgtctaagaaaatggttttatggctgggcaaggtggttcacacctgtaatcccagcaacttgagtggctgaggcagatggatcacctgaggtcaggagtttgagaccagtctggccaacatggggaaatctcatctctactaaaaatacaaaaattagctgggcatggtggtatgtgcctgtaatcccagttactagggaggctgatgcaggagaattgcttgaacccgggaggcggaggttgtagtgagctgagatcataccattgcacaacagcctgggcgacagagtgatactctatctcagaaaagaaaagaaaagaaaagaaaatagtttcatttcacataaatctttacatgaatttatcacaactgttaagtttaactttccatgtgctgttttttcagagatgttcttaagattatcaatgaaacaattcagaaaaataatttttgcttagtgtttagtatagtatactgtgtataaatccttgattgcagatagttttagtaggccatccaggcctttccttggcttcagaaaaataaatagctatgctcctgaaaaggaatagaaagttcctaaggcttgagatgctaccacttctgtcattagttccatttcaaaaacctcaactgaaaactaagaggcaaaaaagtgtttattcacatgaccgcctgaggacaaacaggaggaagttcgtgtgtaaaacttcagatggctgtgatgtcactcagatgtgtaccaatgcagccatggtaagtagcttggctttatgctttttgttttttccccaggagattaacgagaccagaaggaagcatgaaacgcgcttggtagaggtggattctgggcgtcaaattgagtatgagtacaagctggcgcaagcccttcatgagatgagagagcaacatgatgcccaagtgaggctgtataaggaggagctggagcagacttaccatgccaaagtgagctctcttcagaag

SEQ ID NO: 771 - DNA, 149 bp, Homo sapiens
ctatgctttgcttcttcttttagcttgagaatgccagactgtcatcagagatgaatacttctactgtcaacagtgccagggaagaactgatggaaagccgcatgagaattgagagcctttcatcccagctttctaatctacagaaagag

SEQ ID NO: 772 - DNA, 417 bp, Homo sapiens
tgttgcctaggttggtcttgaattcctggtctcaagtgatcctcccacatcagcctctcaaagtgatgtgattacagacgtaagccactgcgctcagcatgatatcctgacttacagttcctgtatgttttggcttataatatgcattatatttaaaaaatgaattttcatttcttcaaaaatatcctgtgttagtgtgcctctttatagaacaagggggacatgcagtctcactcaaggacaagcaggattctggtacattggtctttaatatggacgtctttgacccatagttattagtaatcatgtgacattgaaagagaatgttagccaacaaaaactctagatccagtgcttgtgaattgcttctctaattttgataggtgatgggagcctttatttaaactacttcttttg

SEQ ID NO: 773 - DNA, 366 bp, Homo sapiens
ggcgatgtccaataaatttttggtgaattaacggatgagtgactggatggattctgatataattgagacttatttgtgactcggtggtgaacttaatatagaacttcttttttttttttgagacggagttttgctcttgttgcccaggctggagtgcaatggcgcgatctcagctcaccgcaacctctgcctcccggttcaagcaattctcctgcctcagcatcccgagtagctgggattacaggcatgcgccaccaccccggctgattttgtatttttagtagagacggggtttctccatgttggtcaggctggtcttgaactcccaacctcaggtgatccgcccgcctcggcctcccaaagtgc

SEQ ID NO: 774 - DNA, 366 bp, Homo sapiens; identical to SEQ ID NO: 773

SEQ ID NO: 775 - DNA, 419 bp, Homo sapiens
gtcattctgatgtggaagctgctttatgcagtgaaaagaagtccactcttgagaccagaagacaaccatatggatcctagttttggtactctgctgctgtgtgtcattgggcaagtgtgcagcctctctgaatctcccttcttctgtgaatgagatttcctataacctgcctcacaggctatgggaggattatatgatgtcatggatgcgaaaatcctttataaaatagacagtgtacacaggagacacaaggatgatcagagtgatggtttcttaagtgattacagggccacacacaggctgttttctaaccctgttgtcacccccagggcccacaggtctcatctgagtgaggggaatctggaggtgtgtttcaaggggtattctagggtctttgaggaatcgtgtaggcacttgga

SEQ ID NO: 776 - DNA, 419 bp, Homo sapiens; identical to SEQ ID NO: 775

SEQ ID NO: 777 - DNA, 298 bp, Homo sapiens
ggtggctcacgcctgtaatcccagcactttgggaggccaagatgggcggatcacgaggtcaggagatcgagaccatcctggctaacacggtgaaatcccgtctctactaaaaatacaaaaaaattagccaggcatggtggcagtcacctgtggtcccagctactcaggaggctgaggcaggaggatagcgtgaacctggaaggcggagcttgtagtgagccgagatcgcgccactgcactccagcctgggcgacagagtgagactctgtctcaaaaaaaaaaaaaaaaaaaaggaaac

SEQ ID NO: 778 - DNA, 1453 bp, Homo sapiens
actactcaccgttcgagggcactgagctagagcaggttcggcagctggaccagcagtacacgatcctccgctcgcccctgatatacggtggcgtggctgtttctctgggtctgggggtcctcaccatgggtgttttactccaaggagccaagagtcgaacaatgttgtcagggaagtggctcctcacggaggccgccttcagcctcctagcggcagtgggctactgcacaggcattggtgtttacctccacgtggctctgcagatcaatagcaccgacacttgcaaaacaagagagaggctctatgcccgcaagggtctcacctggatggactgccagctggcaggcaccgacggagcagcagccacctttgcttgtcttctcgtgatcatgtacggcgccagcgtggtgctggccctgcgtagctaccgagaacagaagcgctacaaaggcagccgagaacagcccggaagttacagtgatgcaccggaatatctgtggtctggaactctttgagatcttccggaacctaaatgtgaacgcacattgtttctctcaaaaagacaggtcttttaaaactccgcattagacaactatggttttcacacacttgactttataaatgctctctttggactgaggcaaagttaaagaattgaggacgggcatggtggctcatgcctgtaatcccagcactttgggaggctgaggtgggcggatcgcttgaggtcagcagattgagtccagcctggctcacatagcgaaaccctgtctctactaaaaatacaaaaaatcgccgggcatggtggctcacgcctgtaatcccagcactttaggaggccaaggcaggcagatcacctgaggtcaggtgtttgaaaccagtctggcaaacatggtgaaaccccatctctactaaaaatacaaaaattagctgggcgtggtggcaggcacctgtaattccagctactctggaggctgaggcaggagaatctcttaaacccgggaggcagaggttgcagtgagccaagaccattgcactccagcctgggcaacaagagcgagactccgtctcaaaaaaatacaaaaaatcatctgggcttggtggtgaacgcctgtaatcccagttactcaggaggctaaaccacaagaatcacttgaacctgggaggcagaggttgcagtgagcaaactccactccacgtcactgcactccagcctgggtaacagagcgaggctctgtctcaaaaacaacaactacaacaaaaaagataggacagtagattttattagaccctgaagcatactggaggctttttcatttctgcattccctgacagtgctccatagagtaggtcttcaaaggtagatagtaatctcattaccctggactgttctcataatgtaacagatcactaacactgaatcttaaaaataaagttcttttagtaattttaa

SEQ ID NO: 779 - DNA, 190 bp, Homo sapiens
gttgtggtgtcttggccgggcacggtggctcacacatgtaatcccagcactttgggaggccaaggcaggtggatcaccaggtcaagagttcaagaccagcctggccaaaatggtgaaaccctgtctctacaaaaaatacaaaaaaaattagccggcctggtggcaggcacctgtaatcccagctgcgtgg

SEQ ID NO: 780 - DNA, 462 bp, Homo sapiens
acatggtacacttacttttgtggaaaaatgcagggaagggaatgaaatgcagatttaaatgtgctttttatttgcataaaggaacactggacaattatattgaaaccaatgaaagcggttggcaacattgaagagacggtatgagtgaaatttctcagtttatatcttatgtcatttcaattttttagaaacttttcgttttgaaatatagatttgcaagaagtcacaaaaacagtgcagagtactcctgtgtatccttaacccagttttctccaatgataatatactgcataactagtacaatatcaagaccaggaaagtcacaatctacagagctcatttaggtttcccccttttacctgcacacatatgtatgtgtttgtagttctaagccgttttatctcatgtgtagatttgtgtgagcagcaccatgatgcaatccagaactgttccctcaccctg

SEQ ID NO: 781 - DNA, 219 bp, Homo sapiens
ctccagcccccgacctgccttcctagcctctcattctgttattgcatctgacaaacacagcccaatactcaatccagtctgagttgctgcgcaattccttaacgctctaggcttctgggcttcctctggttgcattcctaaacataactgacaaacttctccccatccttcaaggcccaacttaaatgtcacaccaataaaacctttccagattccccg

SEQ ID NO: 782 - DNA, 106 bp, Homo sapiens
gaccagtgtccgccaccgcggatggcaagagacctgatcggaccggccctgccgcccggcttcaaggcccgcggaacagcggaggacgaagagcgggacccgagcc

SEQ ID NO: 783 - DNA, 118 bp, Homo sapiens
actaaaaatacaaaaattagccgggcgtggtggcgggcgcctgtaatcccagctgctctggaggctgaggcaggagaatcgcttgaacccaggaggcggaggttgcagtgagccgaga

SEQ ID NO: 784 - DNA, 5003 bp, Homo sapiens
ggatttttgaataatcctagggcagactaaattcagacgacccatctcagaatggtggatcaaagcagcaagtcaatttgccttgtatgcaacttatgaggattagtagaagagagtgggtccagatttctggtggtttctgccctgcagatgtctaacacataagccaggacattctgctgtgagtgacttattgtacccaactctatttctctccatactgaaacatgtctttcataggtgatacaactttttaaaatgtatgtgtagatataacttaaatatggagctttcaaaaagcacaaataggctggacatggtggctcatgcctgtaatcccagtactttgggaggctgaggtgggcaaatcacctgaggtcaggagttccagaccagcctggccaacatgatgaaaccctgtctctactaaaaatacaaaaattagccgggcatggtggtgcacatcggtagtcctggctactagagaggttgaggtgggaggatcacttgaacctgggaggtgggggtttcagtgagctgagatcatgccactgcactccagcctgagtgacagagagagattcaaaaaacaaaaaaaaagcaaaaatatactttgctattgggtaaggtatagtagttggcagcagaatggacccattgaggataactataaaattacagaaaatatttaaatgcaacttattgctatagaagcaaagaggactaaagggcaaaattctagagagtggtaaatctcagaaagcacaagcataaaatgcagctctgggggccctttccacttctggctatagggaagaacctgaatactgaacttgattcaggcagaggaccataacctgggggtcaggggaaggcatgggggggaccagaaaccagaagaacaatcaagactgcaatgaaaaaaatggatacattaggagcttcaaacacatataatttctcaagaaatttccagatgtctcatgctgcatagggcaggagcctgaaaagctaatttgagaagataataagtaggatttttgttttgttttgcattttgcagtacaaaggagaaatgattagaacttaggaagtgccagtgggttggtgaacatgccatcagtaaaagccctggaaacaaggtcatactagagattggttgtgccttgtcacaactgcaaacaatacctgagtggagtattcaaaaacttgcttagaaagaaaactctaggaacagatggcttcactgaagttattccaaatatttaagaaataataccaggcttttataaacttttctagaagaaaaaagatggaacttttccaattcagtttttgaggccagtacaaccttgataacaaaacctaaaaaaaaaacaacaaaaaaacccataaagctatagaccaaagtctcatagatttagatgcaaaatcctaaaattgaaaaaaacatctagccatatccataaactatatcatcaccaagagatgtttattagggcaatcaaaagatttattattttaaaaaaatcagtgtggacttccattcctctttcttttgattcccccctttgacttttcatgtatctctcctgccttccttccccagagtggaggagttagacttgcctcgtgggatgagaggagttgtggctttgtgtctgctggcaccaagagggctgagggtgaggtgtggaagggacagggggaggagatgggcagcattgttgagagattggtaacactgagcaaataaatatgttgagaatgatgacagcaagatttctccattagagaaggtatttataaaaataggaatgaggagagctagaaaacctggagtgtggcattagaatagaactcatatcttttaaatatataggaacaaataaataaattgttgtgtgtgcacatatgcatatattttgtgttcattctactgagaggacctaaacacaatgacacctcagtaacagtaagcacaccaactgccaagttattagttcctaaatactatccacaaaaaaggggaacagggatgattcctagtcagagattgggagaaatacaagatgagcctgaatcatctcatgtacctgacagtaagaaaatactctggctggtctcagtggctcatgtctgtaattctagcatgttagaaggtcaaggtgggtgggttgcttgagctcaggagtttgagaccagcctgggcaacatggcacaattgtctctacaaaaaatacaaaaattagccaggcatggtggcatgcacctgtagtccgaggtactcaggaggcagagacgtgggaggatcgcttgagcctgggagattgaggctgcactgagctgtgatcgtgccactgtactctagcctggaagacagagtgagaccccatctcaggaaaaaagaaaaaaaaaaagatgtcattcagcaggttaatggataaactgtggaacatccagaaaactttaacattcttcaaagaaatagaaaacacaatcctaaaatttatatgggaaccacaaaagacttagaatagtcagctatcctgagcaaaaggaatcaaactggaggaatcatattacctgacttccaattattcaacagagctacagtaaccaaaacagcatgatactggcataacaacagacacataggaacagtatagacaacccagaaacaaattcatacatctatggtgaccacttttgacaaaggaatgaagaacatacactggggaaaagataatgtctttaataaatggtgctgggaaaactggatatccatatgcagaagaatgaaactagacccccatctcttagcatatacaaaaatcaaaattaattaaaaagttaaatctaagacctcaaactatgaaacagctaaaagaaaacatcggggaatctctccaggacattggagtgggcaaagatttcttgtgtaatacctgacaaacaggcaaccaaagcaaaagtggacaaatgggatcacatcaagttaaaaatcttctgcattgcaaaggaaataacaaagtgaagagacaacccatagaatgtgagataatatttgcaaactatccatctgtattaggccatttttgaagtactacaaagaaatacttgagactgagtaatttataaagaagaggtttaattggctcacggttttgcaggctgtacaggaagcatggtgctaacatctgatcagcttgtagggaggcatcaggaagtttccaaccatggtggaaggcaaaaggggaataagtatctcacatggcaggtgcagggcaaagagaggggggaagggaagtgccacacaaccagatcttgtgagtactcagattttgtgaggggtgcttgaggtcatggatacccatttaccctgatgtgtttatacacatttcatacctgtattaaaatatctcatgtaccccataaacatatacacctactttgtacccacaaaaatttaaaaataaagttaatttcaatgtttaaagacttgttattaaaataatagcagtttctataaatttaatatttcaataaaactcccagtatttattgttaacactggaaaaagttttccaaaacgtatatggcagaaatatgggccttgatgtgaggacagcatcaattaatgagggatcctctcccttgatcaaaacaccttccaccaagacccacctttaacgctgagcattacctctcaaagtgagatttgggcagggactaatatccaaactgtatcaacatctgacaaggtgttcacaaccagaatatataaggagctataacaattctatagaaaaaaaaatctgatttaaaactgggcaaaaatctgaatagacgtttctcaaaagaagacatacaaatggcaaacaggcatatgaaaaggtactcaacatcattgatccattagagaaatgcaaatcaaaactacaataagatatcatctcaccccagttaaaatgtcttctctccaaaagacagataataacaaatgctgaagaggatgtggagaaaagggaaacctcgtgcactgtggaaatgttattagtacaaccactatggacaacaatttggaggtacctcaaaaactaaaaatagagctatcatacaatcccacaattccactggtagttatataccccaaagacaggaaatcagtatattgaagatatatctgcaccgtgtttactgtagcactactcacaatagccaagatttggaagcaacctaagtgtctaacagcagatgaatggataaataaaatatggtacataaacacaatggagtactattcagccataaaaaagaatgagatcctgtcatttgcaacattgtagatggaactagagatcattaagtgaaataagccaggcacagcaagacagacatcatgttctgacgtatttgttggagctaaagatgaaaacaactgaacttatagagggtagaaggatgtttaccagaggcgggaaaggcagtgagggcatggtgagggggaagtggggaatgttaacgggcacaaaatgtagaatgactaagacctagtatttgatagcacaaggttactacagtcaataataattgtgcattttaaaggtataattgaattgtaacacaaaggataaatgcttgaggttatggataccccatttaccctgatgtgattattagacattgcatgcctatatcaaaatatatcatgtaccccatagatatatacacctagtatgtacccacaaaaattaaaaataaagtaaaatttcaatgattaggaagaccattgttaatatcagtttcctttaaatgtttctataaatttaatacaatttcaataaagctcccaatatttattcttagtactggaaaaagttttccaaaatgtgtatggcagaaatagggccaaaataggcaagaaaactattttcgagatgtcagttttcctcaaattgttctattaattaaacgccacctgaattaaaatttgacaagtg

SEQ ID NO: 785 - DNA, 5003 bp, Homo sapiens
ggatttttgaataatcctagggcagactaaattcagacgacccatctcagaatggtggatcaaagcagcaagtcaatttgccttgtatgcaacttatgaggattagtagaagagagtgggtccagatttctggtggtttctgccctgcagatgtctaacacataagccaggacattctgctgtgagtgacttattgtacccaactctatttctctccatactgaaacatgtctttcataggtgatacaactttttaaaatgtatgtgtagatataacttaaatatggagctttcaaaaagcacaaataggctggacatggtggctcatgcctgtaatcccagtactttgggaggctgaggtgggcaaatcacctgaggtcaggagttccagaccagcctggccaacatgatgaaaccctgtctctactaaaaatacaaaaattagccgggcatggtggtgcacatcggtagtcctggctactagagaggttgaggtgggaggatcacttgaacctgggaggtgggggtttcagtgagctgagatcatgccactgcactccagcctgagtgacagagagagattcaaaaaacaaaaaaaaagcaaaaatatactttgctattgggtaaggtatagtagttggcagcagaatggacccattgaggataactataaaattacagaaaatatttaaatgcaacttattgctatagaagcaaagaggactaaagggcaaaattctagagagtggtaaatctcagaaagcacaagcataaaatgcaactctgggggccctttccacttctggctatagggaagaacctgaatactgaacttgattcaggcagaggaccataacctgggggtcaggggaaggcatgggggggaccagaaaccagaagaacaatcaagactgcaatgaaaaaaatggatacattaggagcttcaaacacatataatttctcaagaaatttccagatgtctcatgctgcatagggcaggagcctgaaaagctaatttgagaagataataagtaggatttttgttttgttttgcattttgcagtacaaaggagaaatgattagaacttaggaagtgccagtgggttggtgaacatgccatcagtaaaagccctggaaacaaggtcatactagagattggttgtgccttgtcacaactgcaaacaatacctgagtggagtattcaaaaacttgcttagaaagaaaactctaggaacagatggcttcactgaagttattccaaatatttaagaaataataccaggcttttataaacttttctagaagaaaaaagatggaacttttccaattcagtttttgaggccagtacaaccttgataacaaaacctaaaaaaaaaacaacaaaaaaacccataaagctatagaccaaagtctcatagatttagatgcaaaatcctaaaattgaaaaaaacatctagccatatccataaactatatcatcaccaagagatgtttattagggcaatcaaaagatttattattttaaaaaaatcagtgtggacttccattcctctttcttttgattcccccctttgacttttcatgtatctctcctgccttccttccccagagtggaggagttagacttgcctcgtgggatgagaggagttgtggctttgtgtctgctggcaccaagagggctgagggtgaggtgtggaagggacagggggaggagatgggcagcattgttgagagattggtaacactgagcaaataaatatgttgagaatgatgacagcaagatttctccattagagaaggtatttataaaaataggaatgaggagagctagaaaacctggagtgtggcattagaatagaactcatatcttttaaatatataggaacaaataaataaattgttgtgtgtgcacatatgcatatattttgtgttcattctactgagaggacctaaacacaatgacacctcagtaacagtaagcacaccaactgccaagttattagttcctaaatactatccacaaaaaaggggaacagggatgattcctagtcagagattgggagaaatacaagatgagcctgaatcatctcatgtacctgacagtaagaaaatactctggctggtctcagtggctcatgtctgtaattctagcatgttagaaggtcaaggtgggtgggttgcttgagctcaggagtttgagaccagcctgggcaacatggcacaattgtctctacaaaaaatacaaaaattagccaggcatggtggcatgcacctgtagtccgaggtactcaggaggcagagacgtgggaggatcgcttgagcctgggagattgaggctgcactgagctgtgatcgtgccactgtactctagcctggaagacagagtgagaccccatctcaggaaaaaagaaaaaaaaaaagatgtcattcagcaggttaatggataaactgtggaacatccagaaaactttaacattcttcaaagaaatagaaaacacaatcctaaaatttatatgggaaccacaaaagacttagaatagtcagctatcctgagcaaaaggaatcaaactggaggaatcatattacctgacttccaattattcaacagagctacagtaaccaaaacagcatgatactggcataacaacagacacataggaacagtatagacaacccagaaacaaattcatacatctatggtgaccacttttgacaaaggaatgaagaacatacactggggaaaagataatgtctttaataaatggtgctgggaaaactggatatccatatgcagaagaatgaaactagacccccatctcttagcatatacaaaaatcaaaattaattaaaaagttaaatctaagacctcaaactatgaaacagctaaaagaaaacatcggggaatctctccaggacattggagtgggcaaagatttcttgtgtaatacctgacaaacaggcaaccaaagcaaaagtggacaaatgggatcacatcaagttaaaaatcttctgcattgcaaaggaaataacaaagtgaagagacaacccatagaatgtgagataatatttgcaaactatccatctgtattaggccatttttgaagtactacaaagaaatacttgagactgagtaatttataaagaagaggtttaattggctcacggttttgcaggctgtacaggaagcatggtgctaacatctgatcagcttgtagggaggcatcaggaagtttccaaccatggtggaaggcaaaaggggaataagtatctcacatggcaggtgcagggcaaagagaggggggaagggaagtgccacacaaccagatcttgtgagtactcagattttgtgaggggtgcttgaggtcatggatacccatttaccctgatgtgtttatacacatttcatacctgtattaaaatatctcatgtaccccataaacatatacacctactttgtacccacaaaaatttaaaaataaagttaatttcaatgtttaaagacttgttattaaaataatagcagtttctataaatttaatatttcaataaaactcccagtatttattgttaacactggaaaaagttttccaaaacgtatatggcagaaatatgggccttgatgtgaggacagcatcaattaatgagggatcctctcccttgatcaaaacaccttccaccaagacccacctttaacgctgagcattacctctcaaagtgagatttgggcagggactaatatccaaactgtatcaacatctgacaaggtgttcacaaccagaatatataaggagctataacaattctatagaaaaaaaaatctgatttaaaactgggcaaaaatctgaatagacgtttctcaaaagaagacatacaaatggcaaacaggcatatgaaaaggtactcaacatcattgatccattagagaaatgcaaatcaaaactacaataagatatcatctcaccccagttaaaatgtcttctctccaaaagacagataataacaaatgctgaagaggatgtggagaaaagggaaacctcgtgcactgtggaaatgttattagtacaaccactatggacaacaatttggaggtacctcaaaaactaaaaatagagctatcatacaatcccacaattccactggtagttatataccccaaagacaggaaatcagtatattgaagatatatctgcaccgtgtttactgtagcactactcacaatagccaagatttggaagcaacctaagtgtctaacagcagatgaatggataaataaaatatggtacataaacacaatggagtactattcagccataaaaaagaatgagatcctgtcatttgcaacattgtagatggaactagagatcattaagtgaaataagccaggcacagcaagacagacatcatgttctgacgtatttgttggagctaaagatgaaaacaactgaacttatagagggtagaaggatgtttaccagaggcgggaaaggcagtgagggcatggtgagggggaagtggggaatgttaacgggcacaaaatgtagaatgactaagacctagtatttgatagcacaaggttactacagtcaataataattgtgcattttaaaggtataattgaattgtaacacaaaggataaatgcttgaggttatggataccccatttaccctgatgtgattattagacattgcatgcctatatcaaaatatatcatgtaccccatagatatatacacctagtatgtacccacaaaaattaaaaataaagtaaaatttcaatgattaggaagaccattgttaatatcagtttcctttaaatgtttctataaatttaatacaatttcaataaagctcccaatatttattcttagtactggaaaaagttttccaaaatgtgtatggcagaaatagggccaaaataggcaagaaaactattttcgagatgtcagttttcctcaaattgttctattaattaaacgccacctgaattaaaatttgacaagtg

SEQ ID NO: 786 - DNA, 2142 bp, Homo sapiens
ggatttttgaataatcctagggcagactaaattcagacgacccatctcagaatggtggatcaaagcagcaagtcaatttgccttgtatgcaacttatgaggattagtagaagagagtgggtccagatttctggtggtttctgccctgcagatgtctaacacataagccaggacattctgctgtgagtgacttattgtacccaactctatttctctccatactgaaacatgtctttcataggtgatacaactttttaaaatgtatgtgtagatataacttaaatatggagctttcaaaaagcacaaataggctggacatggtggctcatgcctgtaatcccagtactttgggaggctgaggtgggcaaatcacctgaggtcaggagttccagaccagcctggccaacatgatgaaaccctgtctctactaaaaatacaaaaattagccgggcatggtggtgcacatcggtagtcctggctactagagaggttgaggtgggaggatcacttgaacctgggaggtgggggtttcagtgagctgagatcatgccactgcactccagcctgagtgacagagagagattcaaaaaacaaaaaaaagcaaaaatatactttgctattgggtaaggtatagtagttggcagcagaatggacccattgaggataactataaaattacagaaaatatttaaatgcaacttattgctatagaagcaaagaggactaaagggcaaaattctagagagtggtaaatctcagaaagcacaagcataaaatgcagctctgggggccctttccacttctggctatagggaagaacctgaatactgaacttgattcaggcagaggaccataacctgggggtcaggggaaggcatgggggggaccagaaaccagaagaacaatcaagactgcaatgaaaaaaatggatacattaggagcttcaaacacatataatttctcaagaaatttccagatgtctcatgctgcatagggcaggagcctgaaaagctaatttgagaagataataagtaggatttttgttttgttttgcattttgcagtacaaaggagaaatgattagaacttaggaagtgccagtgggttggtgaacatgccatcagtaaaagccctggaaacaaggtcatactagagattggttgtgccttgtcacaactgcaaacaatacctgagtggagtattcaaaaacttgcttagaaagaaaactctaggaacagatggcttcactgaagttattccaaatatttaagaaataataccaggcttttataaacttttctagaagaaaaaagatggaacttttccaattcagtttttgagggcagtacaaccttgataacaaaacctaaaaaaaaaacaacaaaaaaacccataaagctatagaccaaagtctcatagatttagatgcaaaatcctaaaattgaaaaaaacatctagccatatccataaactatatcatcaccaagagatgtttattagggcaatcaaaagatttattattttaaaaaaatcagtgtggacttccattcctctttcttttgattcccccctttgacttttcatgtatctctcctgccttccttccccagagtggaggagttagacttgcctcgtgggatgagaggagttgtggctttgtgtctgctggcaccaagagggctgagggtgaggtgtggaagggacagggggaggagatgggcagcattgttgagagattggtaacactgagcaaataaatatgttgagaatgatgacagcaagatttctccattagagaaggtatttataaaaataggaatgaggagagctagaaaacctggagtgtggcattagaatagaactcatatcttttaaatatataggaacaaataaataaattgttgtgtgtgcacatatgcatatattttgtgttcattctactgagaggacctaaacacaatgacacctcagtaacagtaagcacaccaactgccaagttattagttcctaaatactatccacaaaaaaggggaacagggatgattcctagtcagagattgggagaaatacaagatgagcctgaatcatctcatgtacctgacagtaagaaaatactctggctggtctcagtggctcatgtctgt

SEQ ID NO: 787 - DNA, 4599 bp, Homo sapiens
gggtattgcattcctaaaccagaagtgattctcaagttggagaaaggcgaggagccatggatattagaggaaaaatttccaagccagagtcatctgggtgagttagtatgtgccagatggaatttaaaggaaggtagatcacaaagggtaagtttggataataagaccattgaaatgttctttaggaatcatgttttagaggctccagacctttggaagtaacatgttgacgtgacccaaatatgcagtgactctgaatcacccagcatctcccagtatcactttcatacacacatcttgttgttttttttaaattgtgatataaactatatagtttagccagagattaataaaattttatatatatatgtaacactcatgtacccatcattgagatgaatatataaagtgatttttcaacacccccagaaagctccctgttgtactcttcccagtaaagagcatccctccttttgtaaaattaaatatatttttctatacatgcttttttgagttgctcattcattagctttttaccatatttaccattttttacagaattgttttaaaatagcctgggcccagtggttcatgcctgtaatcctaggtctttgggaggctgaggtgggaggatcacttcagcccaggaatttgagaccagcctgggcaaaataagaagaccccatctctatgaaaacttaaaaaattagccaggcatggtggcacacacctgtggtcccatgcctggctaatttttgtgatctcagctactggggagctgaggtgacagtcttgctttagcctgggaagaggctgcagttaactgtgtttgtgccattgcactgcagcctgggtgacagagcaagattctgtctctaaaaaataaaaagcaattaaaattaaaattacacattcaaccagtaacgatttcagcgtgaagcctgaaaaaatttgtgtttgaaaaagctctccggataatactgataaacattatttgttaagtaccattgatttaaatatctatatagggcactgagagaaaatcataggtaaagtaatggctgccaggaacatagttgttgaacaaaaacagaactgcatgaaatattttaaaattcagtgtttaacaaagaatattgttatagcaatccagctgatgtttgtgcttaaatgaattataaaaacagtcctttcatgttttttagtaaatgaacctgggaaatttgggaaggaaactttttaaaaacactgttagactgcaaactgacaatggaaaaacaatcagtatgagattatgatgggaatgagcaatttatgagggacaaacagctgaacttacctagagcgaaatatattcactctagacttgtaaaagaatggcttggttctaatctgaatctaaatgtaaagatatgtttacttcagtgataccttgtttaaaaaaaaagtgtttgttcttgggacattggactcagtatagtataggacagttgatgaaataaagggcaaatcccacagctggaatagaaccataaacctgatcctgtggcaaggatggcttgttcactcactgatttcactcttattgttgcatacttttatttctagtgaatcagagctagaaaaacaattgagccaggtgcagtggctcatgcctgtaatcccagcactttggaaggccagtgtggatgaattgtttgaggctaggagttcaagaccagcctggctaacatggcaaaatcctgtctctactaaaaacataaaaactagccaagcatggttgcgtatgcctgtagtcccagctacttgggaggttgaggcatgggaatcacttgaacccaggaagcggagattgcagtgagccgagatcacgtcactacactccagcctggatgacagagcaagactctgtctcaaaaacaccaccaccaccaccaccaacaacaaccaagaacaacaaaaccacacagaattggagcctggattataggactatgaattagaacttttagaaatttaatttgttgctgctgtgttgacttgaaaagaggtataagactggaagtgtgcacattgtcataacataggtatgaggagataatggcctaaactgagccatgccttcaaatataatgctaagtttatttctcttacatatcctcgtcaactaacctttcttttcactctgtatttcagaattaattaataccagtagaaactattcaataatgaagttcaatgagtttaacaaaggtggaaaatgtttctgtgatgaaaagcatgaaataattcattctgaagaggaaccttctgaatataataaaaatgggaacagcttctggctgaatgaagacctcatttggcatcagaaaattaaaaattgggaacaatcttttgaatacaatgaatgtgggaaagctttccctgagaattcactcttccttgtacataagagaggttacacaggacagaaaacctgcaaatatactgaacatgggaaaacctgtgatatgtcatttttcatcactcatcagcaaacacatccaagagaaaaccactatggtaatgaatgtggagaaaatatctttgaggaatccattctccttgaacatcagagtgtttacccattcagccagaagttaaatctcactccaattcagagaacccactcaattaacaatattattgaatataatgagtgtggaacatttttcagtgaaaaattagtccttcatttacaacagagaacacatacaggagaaaaaccttatgaatgtcatgaatgtggaaaaaccttcacccagaagtcagcccacacaagacatcagagaacacacacagggggaaaaccctatgaatgtcatgaatgtgggaagaccttctataagaattcagacctcattaaacatcaaagaattcatacaggggagagaccttatggatgtcatgaatgtgggaaatccttcagtgaaaagtcaacccttactcaacatcaaagaacgcacacaggggagaaaccatatgaatgtcatgaatgtgggaaaaccttctcatttaagtcagtccttactgtgcatcagaaaacacacacaggggagaagccctatgaatgctatgcatgtgggaaagcctttctcagaaaatcagacctcattaaacatcaaagaatacacacaggtgaaaaaccttatgaatgtaatgaatgtgggaagtcattctctgagaagtcaacccttactaaacatctaagaactcacacaggtgagaaaccttatgaatgtattcagtgtggaaaatttttctgctactactccggtttcacagaacatctgagaagacacacaggggagaaaccttttggatgtaatgaatgtgggaaaaccttccgtcagaagtcagccctaattgttcaccagagaactcatataagacagaaaccctatggatgtaatcaatgtggaaaatcattctgtgtgaagtcaaaactcattgcacatcatagaacacacacaggggagaaaccctatgaatgtaatgtttgtggaaaatcattctatgttaagtcaaaactaactgtacatcagagaatacacttggggagaaaccctataaatgtagtaaacgagggaaattactctgggtgaagtcagaactttgtagaacacagaacataaagggtgagagaaatctgttaatataatgataatgagaacacctttgccctgaagtcagttctcacagtatagaagagaacttaaagagggaaaaaacaatatgaagatagggaatgcaggaaaacattattctggaatttggaccatacactatgttacaaaactaaaagtggaaaaaacttattggtgaatgaatataggaaacattttgcccaatgccactcttcattaaacatcagagaattcacacggggtgaaacctgggtcagcatccctaggttgagaagggatgcatttttctgctactactacagtttcacagaatacctgagaagacacacttggagaaaccttttgggtgtaatgaatgtgggaaaacctttcatcagaagtcagctctaattgttcaccacagaactcatataagacagaaaccctatgggtgtaatgaatgtggaaaatcattctgtgtgaagtcaagaggccagagaaaatgcacaaactgtaggaaactataggaaagcatttactatgaggttatattttatggagtatatgtaataagaagtagcttctcagtgaacatcagatagtagagaaagtatttttaactgtatccaatgtgtggatgttttaagttaaaatctaaatttaatatagaacagaggtgttgagttgcaggatatctagcaatttaagaaaatgtggaaaaaatatttttattgagaaatagcattttactttgttaatatctagtttagttcattgtcaagactgctattttctaagagacttctaaagacgccactcaagccaatggctataagtagttcaaaggtttattgcttagccatatgaaaaataagggaagattttttagcaaggggacccacaaacaagagtgctcttgtatgtccagaagaaa

SEQ ID NO: 788 - DNA, 476 bp, Homo sapiens
gaaaacatgagaaaatttttgtaggtttgagttagatgatgatttctatataggacaataaaaatatggaacatacaaaaataaatttaatgcacttaattataatacaaatgatttactcactttaaactttgataaattagattttgttaaattcaaaagcttgtgttcttcaaagcacacagttaaggaaatggaaaggcgagtaatggactaaaaaaaatacctgtaaaacagctttggttaagaatagaagaaaaatcctaataagaaaattggtgaaagaatggtgtggaaagttcactacagaaaaaatatgaatggcaaataatcctgatttgggggagagtgttcaataccaatgctaattttttaaatgtcctgtgtttaattttttggagtttgtgatttgcaacatgcccctactgcatggagggagaggagatggtaaaatgaacagaagtaataattgtaaa

SEQ ID NO: 789 - DNA, 476 bp, Homo sapiens; identical to SEQ ID NO: 788

SEQ ID NO: 790 - DNA, 4599 bp, Homo sapiens; identical to SEQ ID NO: 787

SEQ ID NO: 791 - DNA, 4603 bp, Homo sapiens
gggtattgcattcctaaaccagaagtgattctcaagttggagaaaggcgaggagccatggatattagaggaaaaatttccaagccagagtcatctgggtgagttagtatgtgccagatggaatttaaaggaaggtagatcacaaagggtaagtttggataataagaccattgaaatgttctttaggaatcatgttttagaggctccagacctttggaagtaacatgttgacgtgacccaaatatgcagtgactctgaatcacccagcatctcccagtatcactttcatacacacatcttgttgtttttttttaaattgtgatataaactatatagtttagccagagattaataaaattttatatatatatgtaacactcatgtacccatcattgagatgaatatataaagtgatttttcaacacccccagaaagctccctgttgtactcttcccagtaaagagcatccctccttttgtaaaattaaatatatttttctatacatgcttttttgagttgctcattcattagctttttaccatatttaccattttttacagaattgttttaaaatagcctgggcccagtggttcatgcctgtaatcctaggtctttgggaggctgaggtgggaggatcacttcagcccaggaatttgagaccagcctgggcaaaataagaagaccccatctctatgaaaacttaaaaaattagccaggcatggtggcacacacctgtggtcccatgcctggctaatttttgtgatctcagctactggggagctgaggtgacagtcttgctttagcctgggaagaggctgcagttaactgtgtttgtgccattgcactgcagcctgggtgacagagcaagattctgtctctaaaaaataaaaagcaattaaaattaaaattacacattcaaccagtaacgatttcagcgtgaagcctgaaaaaatttgtgtttgaaaaagctctccggataatactgataaacattatttgttaagtaccattgatttaaatatctatatagggcactgagagaaaatcataggtaaagtaatggctgccaggaacatagttgttgaacaaaaacagaactgcatgaaatattttaaaattcagtgtttaacaaagaatattgttatagcaatccagctgatgtttgtgcttaaatgaattataaaaacagtcctttcatgttttttagtaaatgaacctgggaaatttgggaaggaaactttttaaaaacactgttagactgcaaactgacaatggaaaaacaatcagtatgagattatgatgggaatgagcaatttatgagggacaaacagctgaacttacctagagcgaaatatattcactctagacttgtaaaagaatggcttggttctaatctgaatctaaatgtaaagatatgtttacttcagtgataccttgtttaaaaaaaaagtgtttgttcttgggacattggactcagtatagtataggacagttgatgaaataaagggcaaatcccacagctggaatagaaccataaacctgatcctgtggcaaggatggcttgttcactcactgatttcactcttattgttgcatacttttatttctagtgaatcagagctagaaaaacaattgagccaggtgcagtggctcatgcctgtaatcccagcactttggaaggccagtgtggatgaattgtttgaggctaggagttcaagaccagcctggctaacatggcaaaatcctgtctctactaaaaacataaaaactagccaagcatggttgcgtatgcctgtagtcccagctacttgggaggttgaggcatgggaatcacttgaacccaggaagcggagattgcagtgagccgagatcacgtcactacactccagcctggatgacagagcaagactctgtctcaaaaacaccaccaccaccaccaccaacaacaaccaagaacaacaaaaccacacagaactggagcctggattataggactatgaattagaacttttagaaatttaatttgttgctgctgtgttgaattgaaaagaggtataagactggaagtgtgcacattgtcataacataggtatgaggagataatggcctaaactgagccatgccttcaaatataatgctaagtttatttctcttacatatcctcgtcaactaacctttcttttcactctgtatttcagaattaattaataccagtagaaactattcaataatgaagttcaatgagtttaacaaaggtggaaaatgtttctgtgatgaaaagcatgaaataattcattctgaagaggaaccttctgaatataataaaaatgggaacagcttctggctgaatgaagacctcatttggcatcagaaaattaaaaattgggaacaatcttttgaatacaatgaatgtgggaaagctttccctgagaattcactcttccttgtacataagagaggttacacaggacagaaaacctgcaaatatactgaacatgggaaaacctgtgatatgtcatttttcatcactcatcagcaaacacatccaagagaaaaccactatggtaatgaatgtggagaaaatatctttgaggaatccattctccttgaacatcagagtgtttacccattcagccagaagttaaatctcactccaattcagagaacccactcaattaacaatattattgaatataatgagtgtggaacatttttcagtgaaaaattagtccttcatttacaacagagaacacatacaggagaaaaaccttatgaatgtcatgaatgtggaaaaaccttcacccagaagtcagcccacacaagacatcagagaacacacacagggggaaaaccctatgaatgtcatgaatgtgggaagaccttctataagaattcagacctcattaaacatcaaagaattcatacaggggagagaccttatggatgtcatgaatgtgggaaatccttcagtgaaaagtcaacccttactcaacatcaaagaacgcacacaggggagaaaccatatgaatgtcatgaatgtgggaaaaccttctcatttaagtcagtccttactgtgcatcagaaaacacacacaggggagaagccctatgaatgctatgcatgtgggaaagcctttctcagaaaatcagacctcattaaacatcaaagaatacacacaggtgaaaaaccttatgaatgtaatgaatgtgggaagtcattctctgagaagtcaacccttactaaacatctaagaactcacacaggtgagaaaccttatgaatgtattcagtgtggaaaatttttctgctactactccggtttcacagaacatctgagaagacacacaggggagaaaccttttggatgtaatgaatgtgggaaaaccttccgtcagaagtcggccctaattgttcaccagagaactcatataagacagaaaccctatggatgtaatcaatgtggaaaatcattctgtgtgaagtcaaaactcattgcacatcatagaacacacacaggggagaaaccctatgaatgtaatgtttgtggaaaatcattctatgttaagtcaaaactaactgtacatcagagaatacacttggggagaaaccctataaatgtagtaaacgagggaaattactctgggtgaagtcagaactttgtagaacacagaacataaagggtgagagaaatctgttaatataatgataatgagaacacctttgccctgaagtcagttctcacagtatagaagagaacttaaagagggaaaaaaaaacaatatgaagatagggaatgcaggaaaacattattctggaatttggaccatacactatgttacaaaactaaaagtggaaaaaacttattggtgaatgaatataggaaacattttgcccaatgccactcttcattaaacatcagagaattcacacggggtgaaacctgggtcagcatccctaggttgagaagggatgcatttttctgctactactacagtttcacagaatacctgagaagacacacttggagaaaccttttgggtgtaatgaatgtgggaaaacctttcatcagaagtcagctctaattgttcaccacagaactcatataagacagaaaccctatgggtgtaatgaatgtggaaaatcattctgtgtgaagtcaagaggccagagaaaatgcacaaactgtaggaaactataggaaagcatttactatgaggttatattttatggagtatatgtaataagaagtagcttctcagtgaacatcagatagtagagaaagtatttttaactgtatccaatgtgtggatgttttaagttaaaatctaaatttaatatagaacagaggtgttgagttgcaggatatctagcaatttaagaaaatgtggaaaaaatatttttattgagaaatagcattttactttgttaatatctagtttagttcattgtcaagactgctattttctaagagacttctaaagacgccactcaagccaatggctataagtagttcaaaggtttattgcttagccatatgaaaaataagggaagattttttagcaaggggacccacaaacaagagtgctcttgtatgtccagaagaaa

SEQ ID NO: 792 - DNA, 10766 bp, Homo sapiens
gttgcacagacagatggagcagtaccgagaccagccccagcacttggagaagattgcctaccagcagaagttgctgcaggaggaccttgtccatatccgagctgagctctccagagagtccactgtgcgtagagggtggcagacctgtctccctcaggacgggctgagcaaggggctgcttttctcccctcccaagatgtagttgagttggtgtccagaggcaagagtcctgaaatagcagagcttctccagtagcagaactgccacctgacagtagataaccttgtctgggggtgacatgtctgcctgcacgtgtgccttaggctgcttactacagcgactcttgaaggccagtgacacccagtgggccagattcttcagagctgcctgcaaggctgttcccctgatctgtgtgcagttaattccaagttgtcagaatctgctttttcacttttcagtctgttgtggtacaggccagggctgagaatcaaagcatcctgagggtggaagagtgaacagtgcaggtgaccagggtcagagcacaaatgagaggatgccacgctctttcctgctcctctctctctcccaccaggcctgcccggtctccttccctcttcccctggctgggtcagcatggtcaggagtacaggtgttcgtgaggccttccaagggggcaggggataactaagaaccggaagcattgtcttggccaacaggagatggaaaatgcttggaacgaatacctgaagttggagaatgatgtggaacagctgaagcagaccctgcaggagcaacacagaagagccttttttttccaggtgacctgatacctgtccatctcttctgagctcttgttttttgttttttgttttttgtttttccaagagacttcacctgtgggggttgtgagcactgctcagagtccttctccccctcagccccagatgctccacccctgtaaaggagccaccccaagctctcccttgaggatcccttccccaagccaggctgtgatgagaagcttcaccccattccccttgccttgctgctctcaaagacaagctcttgggtgttttagaaagggctttacttctgatcatttggtgtcatcagtaatcacagagtgatccatgttcctgtagttcttggccccatcttaggctgctagctcatcacttagacagcagcaggaagtgcccaccccttccctcctctgattcctggagatagatgttatcacacctctaccagagggagacagtgtgaattctgtcctttgaggcactctggtctccaggcagtcatctgcatttctggaggccaggctgggtgatgcccatctctgtgacccctataccactcaggaaagttggccttagagccctgccacttcacccttaaaaaatcaggccaccctattgatagctgcctctgtcccccagaagtgagacagtgaaaggccctgtgtggtttttcttcttccaaattgggttccaaattgcccagtgttcccccactgtggtgcttaaccaggtttccaccccaccctcacaattttttaagtggaaaataacctgtttttttctcccctgacttaagatctatatcttctcctttcagggccctgacataataagtgtgtttgaattcagcaagcattaattgaggcttcttgtgtatgaggcaccatgctgggccacttttggtgctgggcttgttaactgataagatagttctaaccaaggctctttgtttaagtgatttaatgagtatgttgactctccagacattagcctcaccccagaaagttgaaggaaattctggagtagggtgtaggtgtgtgggccctgaggcttttccaagggccctgctgtccctctattcatgcagagatggttcccagagagccctgcctaggaccacgtggaggagaccctcgcctgtggctcagggctggtctacaagactctccccagcacttgtctatctcctgctgctgttggggtcgttttcctcccataatttctcttcatccacactggctaacatttcactactcttttttgtagccgcagcatttaccgtaatgacttgaaaatactaggtgaatgttgttgacaaagtccttcaattatttctggttatgagtttataaaactgcccaggttatacctattttcttggacttcagtgatctgaatttttttagcagtaatttttttttgctttatttttagcagtaatttttttaagcttttcattctttgttcctgtaattacacaaatggtacatgaatacgtgtctttgaaaagaccaaaacagtaagaagcaaaaacaaaaaatgatataaaagttcctcttccccctctccctttctgcccctcccatcaccctccctatgtgtcatcagtgctatctattggtggcattgccttctagaccattttctatgcattttcaaaaatatgcacatgcatagaatcatatgatttattcaggaatgggagcaggtaaaaggcttacttgaagaggatcacacttacacattatttggcaactcactttttttgtcataacctgatatcgtggaaatctttccaggacagttaatccaaaatttatgctgcccaataaaatataaattaattaaaagtaactgaaattcaaaatgtattcctcatttacaccagactcattcaagtgctccatacccacatgcagctatcggctactgtcttggacagcagggattataggtttctatcatctcagaaaggtgtattgggcagcgccagtctaaggaaattaaacttgtttttcttgactgttacatactatttcatagtctgggtgttttctactttatttagccattcctcttctgatagcatttaattattttcagcgttttgcttttataaatggtggtgtgataaggatttgtgtaactgccttttcacattgtttacaagtatctgtgtaagataggctcctaggagtggacttgctggggttggaatgagtatacatcttaaaagttgatggatatgccaaaccaccttctaaagggctgcacctgtttatcttcctacccacagcaaatgaaagtactggacctatttgctcacatccttgtcagcacttgtaattgatctttttagttttactagtctactaaatggcatcttgctttaatttgcttttatttagttattagcaggttaaatatctattcgtatgattattggccatttgtgtctttactgtgccttatgtcatggtgatttaacatatagcaggcctagaatccttttttttttcccccttccctcccaaaagcaaatagatacactgtgacaggtctttgtcacagacgccctggagaactcagccccatgacttactctcagataggccagcctggagcctgcatcttgatttccaccttgcctgtggcactgctcacactttccctaagtggcacagtaacctgggaagctaacaaagccctgctttgagcaggcactgtgctagcttctttggtgtcattctaggccaggcaggctgttagagccctagaaaaatcatcagcactgcagatgcacttgcagccccatgtgcagattctcagtaacagggcttagaaattcgcctccctgtagtcaggtttggctgcaggaaaatagccttttcagtcaaggctaaaacagtgagttcaaggctttgctgaaagcagcacataggagcctttctacccagtgtggtgggaggaggcaggaatgaaactccaccccctcatttcccccaaaattcccctcccctcattatgaaggcccaaaattccatcaccgttggagaaggatagggactctccagccttttttattctctgctctctgttcttttctcacatgtgggggtgacagaaaggcatcaggggggcaagaaagtggctgacaggggagctttgccagggagctatggaggaggaagaggactgcgtttaatccctttctttacctgttctcaacactcagcttggggacttcagccctagaggtcatcctcttacatacacatgccctgggctcggtaatacacctgtctgttttaggatgctcatgctttggcatggagctgagaatcaaacccattattagcttgccagacctgaggatgtgctttatgttggaggggttgagagagagagtgagaactgtgagccccaccttgggacaggaggctttggacttctgttgtcctggctgttggaaagtatttgctcagggaatttttacatgactggtcctttattcacgtagcatgtatgcactgagaacctgctaagtgccaggccctgtagggatggatcaatgagcagtattgggcaggtccatgaggctcatgcagtgcaagaactcttccagttgaggggtagctaggtgcctcgagaggagatggggtgggaagcctgcctttattttagtccatggggtgggaccaaggctatctttcccccattttaacttaaaagtcaagagaatactacatttgatgtttaaacagccccgtcaagagatggctgtagtcccttaaccccatcagacccctctgcacctcttttagatcctcttcccattcgattttggttgtcagaatgcacatgatcatatagcctaggtccttccccattgtatgtagatatgtatttttttggagtttataatttttttttaattgatatataaaaattgtactcttattgtgctaaaaaaattaacagctttatcatatatttcacatgtcataaaattaaccctttcggctggtcatggtggctcacgcctataatcccagcactttgggaggccaaagcaggaggatcacttggagccgggagttcaagaccatcctgggcaacataacaagacccctgtctctacaaaaactgaaaaagaaaaagaaaaactagccaggcatggtggcatgctccggtactcctagctacttgggaggccaaggcgagaggatcacttgagcccaggagtttgaggttacggtgaccttgatcataccactgcacttcaacctgggcaacaaagtgaccctatctcaaataaataagtaaataagtaaattcacccttctaaagtatacgtttcagtggtttttagtatactcacagcatgatacagccgtcaccgcaatcaattttataacacttcatcatcccccagtagaaatcctgtatccattaacagtcactctcattcccccagcgtcccctctgcccttgccaaacactaatctactttctgtttctactgatttgactagtctggacatttcttataaatggaattatgtaatgtgtggctttttgtgactggcttctttccctcacatgttttcaaggatcatccttgttgtagcatgcatcagcacttcattcctttttattgccaactaatattccattcactactgtatttttaactaaacctcaaatatcgggttcagctgactttttaaaaatgttttttatatcctagagatggtgtaaactctagtccttgccttcccttctgtcatgattacataggacagtgcctttcaaaaaaactgtggtaaaggccaggtgcagtggctcacgcctgtaatcccagtactttgggaggccgaggcaggcagatcatctgaggtcaggagttcaagaccagcctggccaatgtggtgaaaccgcgtctctactgaaaatacaagaattagccagatgtggtggtgggcgcctgtaattcagctacctggttgggaggctgaggcaggagaaatgcttgaacctgggaggtggaggttgcagtgagccgagatggcgccattgtactctagcctgggcaacaggagtgaaactccatctcaaaaaaaaaaaaaaaaaaaaaggaaaaaactgtggtaaaatacgtagaacataaatttaccacctttattattattattttgttgagacagggtctcactcttttgcccaggctggagtgcagtgatatgatctcggctcactgcaacctctgcctcccaggttcaagcgattctcatgcctcagcctcccaagtagctgggattacaggcgcacaccaccatgcctggctaatttttgtatttatagtagagatggggtttcacatgttggccaggctggtctcaaactcttggcctcaagtgtttacctccttggcctcccaaagtgcggggataacagacaagagccattgcacccgactcatcttgattatttttaagtatacagttcagtggtgttaagtacattcacatttttgtgcgcccaatctccagaactttctatcctgtataactgaaacattatacacattaaatagttctgcattcttccctctcccccgcccccagcaaccactgttgtacttcctgtctctacgaaattgactactctaagtatgtcatacagtattttagcggaatggcacagtgtttacggcagtctgtttttaaattaggtaggcaagctggactgctgaaagctactctgaaatttctccctggatcgtgggcattttccttgtctatgcttacctagaaagctatgaagcaggcttggttctagcactagtggggtttccagaggggatgctgcccctcagggcggggggctctgtctgaaatggtaggataagtcctaagaagaaacttgtaaggagctaagaaggcaaacccaccacttcgtcttcctcaggagaaatcgcagatacagaaagatctatggagaattgaagatgtcactgcaggcctgagtgcaaataaagagaacttcagaattctagtggagtcagtaaaaaatccgggtgagatgttcatcttcctggatgtgggggatctgattgggggcagggtggtgggagggtggaaggctgggaaccaggtgggtgggatggcccttggggaggttgagtcttcgaggtgctaaattactccactcatcctccaaggaagggggtctttgttccatcccgtgctttgtttccttctatgccccttagagagaaaaacggtgcctttgtttcctcacccgcctgtgccttcactctcaacttctgagagcaagccgcccccacagcccagtcctcccaccagccctgtgcggacccctctggaggttcgactcttcccccagctgcaaacctacgtgccgtaccgacctcacccaccccagctgaggaaagtgacatccccccttcagtcaccaactaaggcgaagcccaaagttgtaagtagtgataactaggagctgaatgccattgtttcctctctgtcctcagattaccttctcctgggagagaaactcctgggaaaacttggggaaatggacccagccagcgtcctaaaggagtccttagtcacaagcagttaaaaagtagtatttccctgctattgtgccttagactgtcagaactggaagagccctggaagatgatctaacccaactctcccattttgcagttgggaaaactgaggcccaccaagaagaagtgagcgtgctgagtagggtggagtttgtgatctgcagagaggtgtgtggctgtggacgaagctgtccccatgcaaacctttgtgcaaatccgcagggggctctcctgcagttacacagcctgtgggcagtgagttcagtccagtggaaaagtgtccttcccttcacccgccgctgagcactgggctgggttgtgaggatgctttgatctttaaaataacctcgcagagtatacacagcaagagcagtatccccattccacagagaagaaaactaagagcctaaattgttgacatttgctcaatgtctccatgctaactagtgaatccaatcacatctcctggcccttctcttttattctgtgccatctgccatctaattgggctttcagtcccagatccggtctgtggcctctgtggctgactgggccagcaccttggtttgcctggcatagaaaggggccaagctcttggcagagtctgggaatgcaggagactttaaagaaataggagatgtggtcaggtcccaagagagctcacgcctccagggccaggccagccttggctggagaacacaatgaggctggtcccagtgcagggaagccatagaagagtggacctcggaatggggccctccagatttttgccaacaaaggcttggaggagacttacctgggcattgtgtgtgcctggacctctgatgaggtcagtgcacagtgctgggtaaaacacatgagttctgctgccctggtcttcaccatctacctgcttccagccatagtccagggcccagagctggacccaggatatggcccagcacccagccagagagtcactgtggatttcagcatcttgagatctccttcccaatcccagatccaagaggtggactggagctctagccctaaaacaggagagggaaaattccaaaacaaacagcaggaatgtctggggcagatggctgccaacatagggcagaatgctgccagctgggacagggcgtaggggaaaaaggcactggcataggagctgggacacccagattccgggactgattctctcactgtgtcctcaggcaagtccgtcccttccctgagcctcctcattttcccttttgtagatggtcacagaggctcctcctcagcttggtcatctgtggctctcaggcagggctttctcagcttgggtgagcatcaggatcaccaggagaggtcctctctcctaggaatatatgtgtgtttgccagttttaccatttgttttattacttacttgtttttaacacttataagatgggcgtggtgctgcttgcctgtcgtcccagctactgggaaggctaaggcaggaggatcatttgagcccaggagtttgaggctgcagtgacctgtgattacacaactgcactccagcctgggcaatacagcaagaccctgtctcaaaacaaaataaaacccatttatatttgtgaaacaataatatccatcctgaaaatgacataaaacaggattatataatttaacaaataacaataaagagaccacctgttttataccaacagctagactaagaaatagaacactgccagcaaccagaagcctgtgggttctttcccaggccaagctgcttcctgtctgccagaagtaaccacaatcttgactttttggataataatccccttgcctttttttttttttttaattttagtacctgtgttgactcctaaacactgtgattatgctggtatataattctatatactattttgtgtcttgcatcttttcttcaacattatgtttgtgagatttatatacattgttgcatgtggctatagttcttttatttttatttgacttattttcttgagtttaatgtctttttaaaaataaattagataatattctcaaaagatacaaaagcaaaagatataaaaaagtacataataacatgtctccttcccaccctctgcctccagacattccattcaatcaaaggcaatcaatgttttatgtttatctttctggggagctttttagaaattggtgattcggatatcttgtcaggattggaaactgtggatcctcagagaaccagtgcgtatcttaggcagatggcttaactttcacacatcagtgaagattgttgataaacctttgctttggagtgctctttcctgaactttccaagagcttggagtgccctttcctgaactctgcaaaattcttaaaaacaaaaccaaattagaccgagaaagagggaatttaggaggtggaaggcatgatggtcgttagtcctgcgagtgggtgttcatggcaaccaggggccggtctgttgatatgtagaggaaccacagccctcacagaacactgtggacagggagtttcaaggaaaatgttgcattcatcacattctagggaatgaactgcatggtaggcagtgagtcactcatcctgaccgcctgttctgtctgagtcaggaaggaggaaatattttgtaaccatgcacatttctgatagaaaggccaggaggatgtagactctgtccttgttcaggtccccaccttgctgaaggcgccagagctcgtgtagggccaatgagccggctcaggctgagcactgctgagtgggtagatgttactctccaggtaggtggtgctgtgataagcatggaagtcagggcagggttagcagcctgcctgcgatgtgcactccagatgagcggagggagcagttcagcacagcaccgagggcatggacccaggagacctgagtcctgggtttcaggacacagttatacaggtaacacttggaggaatagaaactgtatacctctgaggggatagaggagcagagcatgtcccttcttcactgctccgccaggggaagtgtgagtgctccttggctgaggcagtcatgttctgtggctctgatgtggcctgttcctaccctttaaacctccactgtggcagtacctagcagtcctccctccagctccgtctcgctgaccactggtctggttctctttctcagcaggaagatgaagcacctcccaggcccccactccccgaactctacagcccagaggaccagcccccggctgtgccgcctctgccaagagaggccaccatcatccggcacacatctgtgcggggcctcaagcggcagtcagacgagaggaagcgagaccgggagctggggcagtgtgtg

SEQ ID NO: 793 - DNA, 2613 bp, Homo sapiens
gacactgccccccatcagggacaaaggtcacccctgggctggcccccatcctctattggggaccttgctcctccatgccctggggaggaagaagagaaataagggtgggtcattgactgggtgctcttggtactcctgcaagaatgtgtgatgagggagaagcagggacccatccaccccagcacaaacatgcttgcacttctctttcctcactaagggctctcagggtccacgtcaaggctccagcagtcgtccaccattgctccctacgtcacactccggaggggtctcaatgccgaaagcagcaaggcgaccttccctgtgagtggccttgagctgtcgaggacctccctgctccttcacatggggagggagggtctcccagggggacagtaactggccatcccttcagccctggggatggcctctggggtggcctcagcccctcctgagctccctgtcacccactgtccaccaaggagggcatcctgcctttctctctggcctgtcagggtggcaggagggagctcaagaagcctgcaccctgggttctggcctcactggacaggcctgagcctaagtgtctgcatctgcagaatgggtgctactcagaaagctcctgagggttgggggcatcgtgttgcttagaggaaatagttctctaaggccaagaggagcccaactagagtgtgcatgtgtgtgagagagagacaacgggaatgcagccagcagggtggctgtcctctgcgtgcccagcccagctgttctgtgtctctcttgcctgcctcctcttcctcagagacctaagagtgccttggagcgcctgtactcaggggatcaccagcgaggcaagatgagtgcagaggagcagctggagcgcatgaagcgacaccagaaggccctggtccgagagcgcaagaggacactgggccaaggggagaggacgggcctgccctcatctcgctacctcagccggccgctccctggagatcttggctcagtatgttaggaggggccaggcagcggggcagggacagggagccgagtgcccctcagagtcccccaaacacaagcacatcacacctcccagtgagagagctgtccattgacctacatggttcagagaacaccccacggggctgtttgtccacgacccaggctggacgaatgcctggtcagagggtgacctgaaccagagctggagtgaggatcaaacaggcccaggagcctgaggaaatacccagtcagtcctcccagccgcgatggagaggggcctttgcaggcgttcggaatctcggctgaattcaggacctgggaatacagggttcagagaggagaggaggaagatggtgacatgatttggttagaagcacaagcaaactgatcagcctcccagacctgccagcagatgctgtgtgagggtgatggagcacggggtcacacccctgccccaagggccactggtctccctgggcttgcagtgcagaggcctcagggtgtctgggattgctggggaggcctgtgctgccccctggtggcgcttcctggcgctgcgccctgtccacagtcaccttaggtccctttggaaacattccatttgacttttccctgttgtttgaaatcccatgtttccctaaacctctagcctgattgttctttccctaattcattgcacaagctcctttgcttttagtgttaccgctcattgcctctctaatcctgcctgattgtgtttacagaagcttctgatttgcattgaacatgctctaactggcctgtgctacttattaccgggcttgtaatagcggttcttgtctccatagcctgttgagtgttcccagatgtgactcacctttctgctgccctcttcatgcaggcctactgactcataattcacttgtcccaaaagccaccccacaagcctgagccaacctgctgcctgacgccacagtcattggcagaggtctgggcattattaatttataaaaatccatgctttacacctggacagtagacagggacttcagagattgcacgtttgaatacattctcccaagactgaggttgttcggttttaattcctgtagtccaatcacacaatttcttatggaaaaccttttgtgtttctggtatttaataacttgaagggatagcaaaatatactgtgtattcagagggcctctctgcagctgctagctcagacaccaaaggggtaaggcccaggacattcatatctttaaaagctgcaaacctggtaacctttaaacttttaaaacaaatgtcatatggggtaacactgaccttttataatttgatgtctcaaatgtagagattatctaaaaatcgtaacttgaataccttgtaatttttctcttaaaaaagaagacttgtgtaagtctctgcatcaacgccaataaacatgttgcttaataataatggattggcgtggttcttccccaggataccttatagagtctagtgaacttttcctgtttgtggaaacaatcaggctgggtttaaatgaggacttgtctctatttggagcatttgtgagcgtgtaaggaaatgagtgttttctttgtgaatcattaaattgattttttcatctttgga

SEQ ID NO: 794 - DNA, 123 bp, Homo sapiens
gtctccactaaaaatacaaaaattagctgggcatggtggtgggcacctgtaatcccagctactcaggaggctgaggcagaagaattgcttgaacccgggaggcagaggttgcagtgagccgag

SEQ ID NO: 795 - DNA, 8229 bp, Homo sapiens
  SITE (1012): n equals a,t,g, or c
  SITE (1015): n equals a,t,g, or c
  SITE (1016): n equals a,t,g, or c
  SITE (1020): n equals a,t,g, or c
ctcttccggtctttctggtctcggccgcagaagcgagatggtgagttgtgactgtggtgtttgtgaatcgcgttccatcctcgtcctttgtgcctctctgtttgctgtgcttggggggctggcaagattccggataaggggaactggtgggctggaaagaggcatgcggtggccctcaagagccagaagaatgactgctaactggtgcctgggggacctatcccgccgtaattgtggtgctagagccgcattgtgtcctttgcctcggtccaacctttggagacctttcacggctctagccttggttgggagccgagggaaggagtttgggaatgtttggctctgtgtaacaatgaaataattcattggtgatgctctctggccggagtctgtaaagataaggtgcatttcagaacattgcaactcttgcggagggttttaggtaacgtgaaatgcgggtagtggtctctgacttggcattcgtggaaagaggcttctcccgcagtttcgatctttacgattgcctttaaattttatcagtaattggtttcccggagaactcgagtaaatctagaagttgccaggtttcagaactatttattcctttaatgtgcagacgaagggaacgtcatcgtttggaaagcgtcgcaataagacgcacacgttgtgccgccgctgtggctctaaggcctaccaccttcagaagtcgacctgtggcaaatgtggctaccctgccaagcgcaagagaaagtgtaagtaacatttttcaggccaactgtgttagcttttgtttgtattgcacttaagtgggggcataggtttgaactttatttggtgcctatcttaaaactcgtacatctgtatgccgatgaggtggcataaaactcgtgtattaacaacacctacaaggtgtgtgggagaacaccgtttgaaatcttttctgaacttatgttttagataactggagtgccaaggctaaaagacgaaataccaccggaactggtcgaatganggnngggnccaaacccctaaaaattgtataccgcagattcaggtacagtttgtatgttcgatcataattggtccagtgggcttgaatgaaaccctcgtgtttacttgtaaaaagataacagtaccctgatggttactggggatgagatgttggaagctttttatttattgttgtttttgaggcagggtttcactatgttgcccaggcttgagtgtagtggcacgatcacggctcagtgcagcctcagtctccccagcctcaggtaatctcatctcagccgcccgagtacccgggactacaggtgtgcgctgccacatgcccagctaatttttgtatttattgtagagaatgggatattgtcatgttacccaggataatctcggaactcctgggctcaggccagatgttgaaagcttttatcttctgccgctgtaaccttgacatcagttagtttggattttattagtagttttttcactaaacagtagtataaattaaataacaggagcattgtttgaactagggtcccaaagtgttgatatttattaggtttaattggtgtcaaaatttgtcaagacagtagtgaataaggtctggagtcaggcttggttcaacctttagtatagtggctgtgggcaagagtgctgtagaaaattgccctggttgctgctgttgccttgggctcttgttactcaagtcttggccttagagttataaatgcagaatctcagctccgccgtagacttagctgagagaacctgcatattaaagagtagtttctaagagattaacccatctaagatctcagctaagattcagaatgatgcagacttaactttaaagctggtgctccttccgttactatgttctatttcagcaattctcagctattgatactttgggctggataattctttgtggtgggattgtccagtgcaaaattgaatattttgcagaatccctagcctctacccactcagtctccggagtgtccagttttaaagatagcaagacagttcagggctttgtagacacccataggtgtgttcaagtgctgaagcaactttctttgcatttagggtcataacgtttttgtgggcttaatgttgagtggtctgttagtacaatataggagttaagagcttgaactgaagccaggcttttaaaagtaggatagttgacctttcttagagtagatacttcttagagtagatacagatgttaaataagttaaaatgcaaagctcttggtttagaaaatgtctgccattaaacatgctaattgttttttccttgcttagtgaaagtagttgggatctattctcagtatagggaaccattttcacaaataatctgtgatctcttgccaaatatgaacaaacatactggcccaatgactagtatagccaaataagtttttgagcctttattgcagttgcagttaactatatccgaaaatgggtatctttaagcaaagtgaagtaaagaatttcagcttatcagtgatgttgtaaaaataaatgtctgaacatatgaatgcagtattgatttcagcatttaactgagataagcgcattgaaatctgtttaacaaaaattaaaatgtatgcatcgatgttgctgaagtaacttgttcttgtttttgacatcctgcaggcatggattccgtgaaggaacaacacctaaacccaagagggcagctgttgcagcatccagttcatcttaagaatgtcaacgattagtcatgcaataaatgttctggttttaaaaaatacatatctggttttggtaaggtatttttaatcaattaggcttgtagtatcagtgaaatactgtaggtttagggactgggctagcttcatatcagatttacttgttaagtgactgttttggaatgtttacttttggactgggtttgtaacacggttaaaggcaatgagaaacaagcagaattccaggagtccttgaagcagagggcactggaagacaatatagcagattaaaatagcacagctcatgtggcataggtgggtattttagatgtttgagtaaatttgaaagagtatgatgtttaaattacctttagcaacatgttcatctgctatgctgtcatgactagggggatgattattagtcacatagagcttgggagtaccactggaaacgtatgggtaggagtttaggtggcttctgtttttcaaaagatgatcttatcctagtatctgtaatgctcacttggcacacctgacttgtgggctgtgtgtaaggtggctagctaagtgaaaaaagcctgctaggtgtgagtcaacttaagaatatgtaaataggtttgagaaaaagtagggcttgggtgcaagtaaagattgagcaggaaataaaggaaaatcaactataatccctgagatttctagactaaaggcaatgatgtgggactacttggtcgaatttttttagccctcaacttggtaattgggtgtttccgtgttaaagcactgaaacttgctgtcgtgccttcctagttttcgtggtttattgacagggttgggggttttttttgtttttttaaaatgaagggacaaagtcaactggactgctgagtgagagggcaggggcagttgaagggaacatgaattgctggaacagctacataaaatagtgatgtagccaagtcatgctatttaaattataattctccactgtgtttagaataacatctgaggttcttaacctggccttggaagggtatcacttttacttgtaacctggaatggctttataatgtgctagctaattgctactctcatcttgtattttaactcctaatttacccttcaggtctcagcttcagaacattcacttataaagaaaccctgctgattaaatctctcttgggcttcctcccgaaatgtgagactatactttaaagatgtatggttagagtccaattgccattgcctttcttgtttacagatagtgcaatggcgcaatcctggctcactgcagcctctaattcctgggctcaagtcaagtggttctcctgcctcagccttctgagtagctgggactacagatgcacaccaccacacctggctaatttttgtgttttttgtagagatggagattcactcggctaattctttttgtattcttagtagagactgggtttcaacatgttgaccaggctggtctcgaactcgaccttgtgatccgccgcctcggcctcccaaagtgctaggattacaggcgtgagccaccactcccggctgtcatcatcaaattttcaagtgaagatagtctgttgaagattgaacaatgaccttgaaagacagctgagttgctgtgggtataatgtaaagctggtgaagtttggccagtttgggcttcagaagtctaagtctagtgaaaataccctgacccccatataaacaacccttgaggccggtgtggtggctcacggctgtaatcctggcactttgggaggccgaggtgggcggatcacaaggtcaagagatcgagatcaccctggcccacatggtgagaccccaactctactaaaaatacaaaaattagctgggtgtggtggcatgtgcctgtagtcttagctacttgagaggctgaggcaggagaatcgcttgaagcctgggaggcagaggttgcagtgagctgagatcatgccactgtgctccagcctggtggcacagtgagactccacctcaaaaaaaaaaaaaatccttgaactaatgactcaaattttcaaatgaaacaaaataagcagtggatcttgcattggagatggagttaaactatgttgcccaggctggtcttggactcctggtttcaagtgatcctctcatcttggcctcccaaagtgctgggattacagggacgagccgccacaccccacccattgtctatatttctatctttaacagcacttcagtcctgccttaagttatagttatgtatagatacccattatactttaaatttttcagcagaaattatgcttttatcttctctgcagtgttaaatttatttttcctaagtaccccatctgcttttcaactctgtcctctgcctgaaaagcctccctccagcccctacttccctcccatcttagttcacaaagtcaggttgatttgcccccagctgtcaaagcagactacctgtttccacatgtaactggttatgttctgtaaagttacaaaaatagaaaggttgaatctgtggcggtcgggtacggtagctcacgtcctatagtcgcagcactttgggaggccaaggtgggcagttcacgtgaggtggggagttcgagaccagcctgaccaacatggagaaaccccgtctctactaaaaatacaaaaatattagccgggcgtggtggtgcatgcctgtaatcccagctactagggaggctgaggcaggagaattgcttgaacctgggagacggaggttgcggtgagctgcagaggcctcacctctaattgagacacaattatatattgttgatatatatatatatgtatacacacacacacacactatgatggataaatgcatgagttcctgtgagagcattggaaaggagtttgtcactcaataggtgaagccaggctaagatttaagctgagccagggaggacttgaaggaatcatgatgagagagaaggtaagtggctttgccagcaatgaaacagctgacataatggtaaccagtcagaggagggcataactatgaaactggacaccttggttgtcaggttagaaggatagggtgtagggttggtaagaaaagaattcagggaagagcagcgatcagattatgaagaatttgtcttgagaaattacagaggatttaaaccagaatgttaggaatagttattctagcaagatgaatgtggaaagtgttagtgtgcatgtgatgagtcttgaagctggaaactaggtaacaggttcttaaatagttcatgtgaaaatcatgacagactaaggcagtggctgtggggctgtccgggagttctctacagaaaacatctaaaacttgaatgtgcaagtgagtagctaacttccaagcttcccatttctgtataatttaagcatgaaaatgagaacactgagatttgataggcatgtagaagtcagagtaagcaagagggcttgagttcaccgatgaacttcagtaactatccttgacttagtattggtggaaaccatttgtgaatttacagactccaaaaacaaaaagataatttagagtctcaaagtaagatttggggagatgtccattggagacagaagtggagagagggagaagttcatttgttgacatatttatgtatggtgcacctactgtgtgccaagccatgttagagatacagtgggagcaaaaccagacgtgttttctgccctctgactccagtggttgcagaattagcccaggaactagaattggatggagtcacacaaaccaaggaaggggattgtttgaggggggcactcagtcacatgtggctgaggccaaagagaatgaagatatattttaaaattctggatttggcaaaatttaggctagtctttacttttcataaacctctctcatgttagagcagcaaagaaaaaccagtttgccaagaggtcaggagattgggcagtgaggaatggggagtttagtttaaaagacaacactagatacttttggaagtttacctattctgtggttcccttttattgactaaatggtgcccttcattcatgaagcaagtatctatttagtgactactatgtgtcaaaagctattctaggcccagaaacttttaagtggaaaacaagacaaagaccctgccctgacagatttcaatcatgtatatactgtatgtatgtttgtggaaggtgacataatagacaattgcagatagtgataagtgtgtaagacaaggataccacgagcgtaatagacagtggggatggaggaacctttagaaggttggttaagttgaatgataaggagccattcttttgtctttacctgaatgacttatcattcagccctttttgagttttgggttgcttgcagagtttaaccttgcctgtaattgaaacttaattttgtaatagcataacttcatgtaagaaaagcaaaggaatacattacagaattattttactgaagaacttgtttcagagaaagaggctgtttcatatttattagcacatttggattatatttaggtgttttattttttttttaaacaaaggagtttggatcataatacaagagaagcacagggcaaagacactgcataacctcaagaactaagaatggaaggactggccaggcctggtggtgcacacctgtaatcccagctactcaggaggctgaggcgagagaatcgcttgagcctggggggcagaggttgcagtgagctgagagaacggcgggcggcagagcgagactccatctcaaaaaaaaaaaaaggataaaggaaggacttaagcaaaatcttccttgtaagtagaaggatgttttgacaagaaaagttgcaatggaaaaatggttctcatgtacacgagtatgtagaataagcatcgtgtgtggattggattcagatcaaaacattgcttttatgtttgtgtctttatacggtgggagtataccctggtgccccaggatgaagacttgacctgacccatgtatttttagattactcacagatacaaaaagtattttcatcatgattagttgcgaaaacagttttatttcaataggtaaaacgtgcagtcctatgtaatcgtcagaaggtaatcttaattatagcttgggtgtgctttaaactgcaagctggcagtggagggcacgattcctctgatttcagctttctccttatacttttctggagctgtgagctgcaagttaactcagtgggattaaagtgtagactggaggtacaaaaggtgaggagtgaggagatagggtagttcttccttggctggctggcttcataatccctgggccccgcagatattaaatcgactttttctgtctcaggcatttgtatgacctctttggaggttccctgctgggtagttatccttgtatctgatggacccatctcaatttaaaatactctgccaggttcggaggttcatgcttgtcatcccagcactttgggaggctgaggcaggcagatcacgaggtcaggagttcaagaacaccctgggca

SEQ ID NO: 796 - DNA, 8001 bp, Homo sapiens
gcggaagtgccttctcttccggtctttctggtctcggccgcagaagcgagatggtgagttgtgactgtggtgtttgtgaatcgcgttccatcctcgtcctttgtgcctctctgtttgctgtgcttggggggctggcaagattccggataaggggaactggtgggctggaaagaggcatgcggtggccctcaagagccagaagaatgactgctaactggtgcctgggggacctatcccgccgtaattgtggtgctagagccgcattgtgtcctttgcctcggtccaacctttggagacctttcacggctctagccttggttgggagccgagggaaggagtttgggaatgtttggctctgtgtaacaatgaaataattcattggtgatgctctctggccggagtctgtaaagataaggtgcatttcagaacattgcaactcttgcggagggttttaggtaacgtgaaatgcgggtagtggtctctgacttggcattcgtggaaagaggcttctcccgcagtttcgatctttacgattgcctttaaattttatcagtaattggtttcccggagaactcgagtaaatctagaagttgccaggtttcagaactatttattcctttaatgtgcagacgaagggaacgtcatcgtttggaaagcgtcgcaataagacgcacacgttgtgccgccgctgtggctctaaggcctaccaccttcagaagtcgacctgtggcaaatgtggctaccctgccaagcgcaagagaaagtgtaagtaacatttttcaggccaactgtgttagcttttgtttgtattgcacttaagtgggggcataggtttgaactttatttggtgcctatcttaaaactcgtacatctgtatgccgatgaggtggcataaaactcgtgtgttaacaacacctacaaggtgtgtgggagaacaccgtttgaaatcttttctgaacttatgttttagataactggagtgccaaggctaaaagacgaaataccaccggaactggtcgaatgaggcacctaaaaattgtataccgcagattcaggtacagtttgtatgttcgatcataattggtccagtgggcttgaatgaaaccctcgtgtttacttgtaaaaagataacagtaccctgatggttactggggatgagatgttggaagctttttatttattgttgtttttgaggcagggtttcactatgttgcccaggcttgagtgtagtggcacgatcacggctcagtgcagcctcagtctccccagcctcaggtaatctcatctcagccgcccgagtacccgggactacaggtgtgcgctgccacatgcccagctaatttttgtatttattgtagagaatgggatattgtcatgttacccaggataatctcggaactcctgggctcaggccagatgttgaaagcttttatcttctgccgctgtaaccttgacatcagttagtttggattttattagtagttttttcactaaacagtagtataaattaaataacaggagcattgtttgaactagggtcccaaagtgttgatatttattaggtttaattggtgtcaaaatttgtcaagacagtagtgaataaggtctggagtcaggcttggttcaacctttagtatagtggctgtgggcaagagtgctgtagaaaattgccctggttgctgctgttgccttgggctcttgttactcaagtcttggccttagagttataaatgcagaatctcagctccgccgtagacttagctgagagaacctgcatattaaagagtagtttctaagagattaacccatctaagatctcagctaagattcagaatgatgcagacttaactataaagctggtgctccttccgttactatgttctatttcagcaattctcagctattgatactttgggctggataattctttgtggtgggattgtccagtgcaaaattgaatattttgcagaatccctagcctctacccactcagtctccggagtgtccagttttaaagatagcaagacagttcagggctttgtagacacccataggtgtgttcatgtgctgaagcaactttctttgcatttagggtcataacgtttttgtgggcttaatgttgagtggtctgttagtacaatataggagttaagagcttgaactgaagccaggcttttaaaagtaggatagttgacctttcttagagtagatacttcttagagtagatacagatgttaaataagttaaaatgcaaagctcttggtttagaaaatgtctgccattaaacatgctaattgttttttccttgcttagtgaaagtagttgggatctattctcagtatagggaaccattttcacaaataatctgtgatctcttgccaaatatgaacaaacatactggcccaatgactagtatagccaaataagtttttgagcctttattgcagttgcagttaactatatccgaaaatgggtatctttaagcaaagtgaagaatttcagcttatcagtgatgttgtaaaaataaatgtctgaacatatgaatgcagtattgatttcagcatttaactgagataagcgcattgaaatctgtttaacaaaaattaaaatgtatgcatcgatgttgctgaagtaacttgttcttgtttttgacatcctgcaggcatggattccgtgaaggaacaacacctaaacccaagagggcagctgttgcagcatccagttcatcttaagaatgtcaacgattagtcatgcaataaatgttctggttttaaaaaatacatatctggttttggtaaggtatttttaatcaattaggcttgtagtatcagtgaaatactgtaggtttagggactgggctagcttcatatcagatttacttgttaagtgactgttttggaatgtttacttttggactgggtttgtaacacggttaaaggcaatgagaaacaagcagaattccaggagtccttgaagcagagggcactggaagacaatatagcagattaaaatagcacagctcatgtggcataggtgggtattttagatgtttgagtaaatttgaaagagtatgatgtttaaattacctttagcaacatgttcatctgctatgctgtcatgactagggggatgattattagtcacatagagcttgggagtaccactggaaacgtatgggtaggagtttaggtggcttctgtttttcaaaagatgatcttatcctagtatctgtaatgctcacttggcacacctgacttgtgggctgtgtgtaaggtggctagctaagtgaaaaaagcctgctaggtgtgagtcaacttaagaatatgtaaataggtttgagaaaaagtagggcttgggtgcaagtaaagattgagcaggaaataaaggaaaatcaagtataatccctgagatttgtagactaaaggcaatgatgtgggactacttggtcgaatttttttagccctcaacttggtaattgggtgtttctgtgttaaagcactgaaacttgctgtcgtgccttcctagttttcgtggtttattgacagggttgggggttttttttgtttttttaaaatgaagggacaaagtcaactggactgctgagtgagagggcaggggcagttgaagggaacatgaattgctggaacagctacataaaatagtgatgtagccaagtcatgctatttaaattataattctccactgtgtttagaataacatctgaggttcttaacctggccttggaagggtatcacttttacttgtaacctggaatggctttataatgtgctagctaattgctactctcatcttgtattttaactcctaatttacccttcaggtctcagcttcagaacattcacttataaagaaaccctgctgattaaatctctcttgggcttcctcccgaaatgtgagactatactttaaagatgtatggttagagtccaattgccattgcctttcttgtttacagatagtgcaatggcgcaatcctggctcactgcagcctctaattcctgggctcaagtcaagtggttctcctgcctcagccttctgagtagctgggactacagatgcacaccaccacacctggctaatttttgtgttttttgtagagatggagattcactcgactaattctttttgtattcttagtagagactgggtttcaacatgttgaccaggctggtctcgaactcgacctcgtgatccgccgcctcggcctcccaaagtgctaggattacaggcgtgagccaccactcccggctgtcatcatcaaattttcaagtgaagatagtctgttgaagattgaacaatgaccttgaaagacagctgagttgctgtgggtataatgtaaagctggtgaagtttggccagtttgggcttcagaagtctaagtctagtgaaggtaccctgacccccatataaacaacccttgaggccggtgtggtggctcacggctgtaatcctggcactttgggaggccgaggtgggcggatcacaaggtcaagagatcgagatcaccctggcccacatggtgagaccccaactctactaaaaatacaaaaattagctgggtgtggtggcatgtgcctgtagtcttagctacttgagaggctgaggcaggagaatcgcttgaacctgggaggcagaggttgcagtgagctgagatcatgccactgtgctccagcctggtggcacagtgagactccacctcaaaaaaaaaaaaaaatccttgaactaatgactcaaattttcaaatgaaacaaaataagcagtggatcttgcattggagatggagttaaactatgttgcccaggctggtcttggactcctggtttcaagtgatcctctcatcttggcctcccaaagtgctgggattacagggacgagccaccacaccccacctattgtctatatttctatctttaacagcacttcagtcctgccttaagttatagttatgtatagatacccattatactttaaatttttcagcagaaattatgcttttatcttctctgcagtgttatatgttggtgtgcaaaaatgttaaatttatttttcctaagtaccccatctgcttttcaactctgtcctctgcctgaaaagcctccctccagcccctacttccctcccatcttagttcacaaagtcaggttgatttgcccccagctgtcaaagcagactacctgtttccacatgtaactggttatgttctgtaaagttacaaaaatagaaaggttgaatctgtggcggccgggtacggtagctcacgtcctatagtcgcagcactttgggaggccaaggtgggcagttcacgtgaggtggggagttcgagaccagcctgaccaacatggagaaaccccgtctctactaaaaatacaaaaatattagccgggcgtggtggtgcatgcctgtaatcccagctactagggaggctgaggcaggagaattgcttgaacctgggagacggaggttgcggtgagctgcagaggcctcacctctaattgagacacaattatatattgttgatatatatatatatatatatacacacacacacacacactatgatggataaatgcatgagtttctgtgagagcattggaaaggagtttgtcactcaataggtgaagccaggctaagatttaagctgagccagggaggacttgaaggaatcatgatgagagagaaggtaagtggctttgccagcaatgaaacagctgacataatggtaaccagtcagaggagggcataactatgaaactggacaccttggttgtcaggttagaaggatggggtgtagggttggtaagaaaagaattcagggaagagcagcgatcagattatgaagaatttgtcttgagaaattacagaggatttaaaccagaatgttaggaatagttattctagcaagatgaatgtggaaagtgttagtgtgcatgtgatgagtcttgaagctggaaactaggtaacaggttcttaaatagttcatgtgaaaatcatgacagactaaggcagtggctgtggggctgtccgggagttctctacagaaaacatctaaaacttgaatgtgcaagtgagtagctaacttccaagcttcccatttctgtataatttaagcatgaaaatgagaacactgagatttgataggcatgtagaagtcagagtaagcaagagggcttgagttcatcgatgaacttcagtaactatccttgacttagtattggtggaaaccatttgtgaatttacagactccaaaaacaaaaagataatttagagtctcaaagtaagatttggggagatgtccattggagacagaagtggagagagggagaagttcatttgttgacatatttatgtatggtgcacctactgtgtgccaagccatgttagagatacagtgggagcaaaccagatgtgttttctgccctctgactccagtggttgcagaattagcccaggaactagaattggatggagtcacacaaaccaaggaaggggattgtttgaggggggcactcagtcacatgtggctgaggccaaagagaatgaagatatattttaaaattctggatttggcaaatttaggctagtctttacttttcataaacctctctcatgttagagcagcaaagaaaaaccagtttgccaagaggtcacgagattgggcagtgaggaatggggagtttagtttaaaagacaacactagatacttttggaagtttacctattctgtggttcccttttattgactaaatggtgcccttcattcatgaagcaagtatctatttagtgactactatgtgtcaaagctatctaggcccagaaacttttaagtggaaaacaaacaagaccctgccctgacagatttcaatcatgtatatactgtatgtatgtttgtggaaggtgacataatagacattgcagatagtgataagtgtgtaagacaaggataccacgagcgtaatagacagtggggatggaggaacctttagaaggttggttaagttgaatgataaggagccattcttttgtctttacctgaatgacttatcattcagccctttttgagttttgggttgcttgcagagtttaaccttgcctgtaattgaaacttaattttgtaatagcataacttcatgtaagaaaagcaagcaatacattacagaattattttactgaagaacttgtttcagagaaagaggctgtttcacatttattagcacatttggattatatttaggtgttttatttttttttaaacaaggagtttggatcataatacaagagaagcacagggcaagacctgcataacctcaagaactaagaatggaaggactggccaggcctggtggtgcacacctgtaatcccagctactcaggaggctgaggcgagagaatcgcttgagcctggggggcagaggttgcagtgagctgagagaacggcgggcggcagagcgagactccatctcaaaaaaaaaaaaggataaaggaaggacttaagcaaatcttccttgtaagtagaaggatgttttgacagaaaagttgcaatggaaaaatggttctcatgtacacgagtatgtagaataagcatcgtgtgtggattggattcagatcaaacttgcttttatgtttgtgtctttatacggtgggagtataccctggtgccccaggatgaagacttgacctgacccatgtatttttagattactcacagataacaaaagtattttcatcatgattagttgcgaaaacgttttatttcataggtaaaacgtgcagtcctatgtaatcgtcagaaggtaatcttaattatagcttgggtgtgctttaaactgcaagctggcagtggagggcacgattcctctgatttcagctttctccttatacttttctggagctgtgagctgcaagttaactcagtgggattaaagtgtagactggaggtacaaaggtgaggagtgaggagatagggtagttcttccttggctg

SEQ ID NO: 797 - DNA, 9962 bp, Homo sapiens
gcggaagtgccttctcttccggtctttctggtctcggccgcagaagcgagatggtgagttgtgactgtggtgtttgtgaatcgcgttccatcctcgtcctttgtgcctctctgtttgctgtgcttggggggctggcaagattccggataaggggaactggtgggctggaaagaggcatgcggtggccctcaagagccagaagaatgactgctaactggtgcctgggggacctatcccgccgtaattgtggtgctagagccgcattgtgtcctttgcctcggtccaacctttggagacctttcacggctctagccttggttgggagccgagggaaggagtttgggaatgtttggctctgtgtaacaatgaaataattcattggtgatgctctctggccggagtctgtaaagataaggtgcatttcagaacattgcaactcttgcggagggttttaggtaacgtgaaatgcgggtagtggtctctgacttggcattcgtggaaagaggcttctcccgcagtttcgatctttacgattgcctttaaattttatcagtaattggtttcccggagaactcgagtaaatctagaagttgccaggtttcagaactatttattcctttaatgtgcagacgaagggaacgtcatcgtttggaaagcgtcgcaataagacgcacacgttgtgccgccgctgtggctctaaggcctaccaccttcagaagtcgacctgtggcaaatgtggctaccctgccaagcgcaagagaaagtgtaagtaacatttttcaggccaactgtgttagcttttgtttgtattgcacttaagtgggggcataggtttgaactttatttggtgcctatcttaaaactcgtacatctgtatgccgatgaggtggcataaaactcgtgtattaacaacacctacaaggtgtgtgggagaacaccgtttgaaatcttttctgaacttatgttttagataactggagtgccaaggctaaaagacgaaataccaccggaactggtcgaatgaggcacctaaaaattgtataccgcagattcaggtacagtttgtatgttcgatcataattggtccagtgggcttgaatgaaaccctcgtgtttacttgtaaaaagataacagtaccctgatggttactggggatgagatgttggaagctttttatttattgttgtttttgaggcagggtttcactatgttgcccaggcttgagtgtagtggcacgatcacggctcagtgcagcctcagtctccccagcctcaggtaatctcatctcagccgcccgagtacccgggactacaggtgtgcgctgccacatgcccagctaatttttgtatttattgtagagaatgggatattgtcatgttacccaggataatctcggaactcctgggctcaggccagatgttgaaagcttttatcttctgccgctgtaaccttgacatcagttagtttggattttattagtagttttttcactaaacagtagtataaattaaataacaggagcattgtttgaactagggtcccaaagtgttgatatttattaggtttaattggtgtcaaaatttgtcaagacagtagtgaataaggtctggagtcaggcttggttcaacctttagtatagtggctgtgggcaagagtgctgtagaaaattgccctggttgctgctgttgccttgggctcttgttactcaagtcttggccttagagttataaatgcagaatctcagctccgccgtagacttagctgagagaacctgcatattaaagagtagtttctaagagattaacccatctaagatctcagctaagattcagaatgatgcagacttaactttaaagctggtgctccttccgttactatgttctatttcagcaattctcagctattgatactttgggctggataattctttgtggtgggattgtccagtgcaaaattgaatattttgcagaatccctagcctctacccactcagtctccggagtgtccagttttaaagatagcaagacagttcagggctttgtagacacccataggtgtgttcaagtgctgaagcaactttctttgcatttagggtcataacgtttttgtgggcttaatgttgagtggtctgttagtacaatataggagttaagagcttgaactgaagccaggcttttaaaagtaggatagttgacctttcttagagtagatacttcttagagtagatacagatgttaaataagttaaaatgcaaagctcttggtttagaaaatgtctgccattaaacatgctaattgttttttccttgcttagtgaaagtagttgggatctattctcagtatagggaaccattttcacaaataatctgtgatctcttgccaaatatgaacaaacatactggcccaatgactagtatagccaaataagtttttgagcctttattgcagttgcagttaactatatccgaaaatgggtatctttaagcaaagtgaagtaaagaatttcagcttatcagtgatgttgtaaaaataaatgtctgaacatatgaatgcagtattgatttcagcatttaactgagataagcgcattgaaatctgtttaacaaaaattaaaatgtatgcatcgatgttgctgaagtaacttgttcttgtttttgacatcctgcaggcatggattccgtgaaggaacaacacctaaacccaagagggcagctgttgcagcatccagttcatcttaagaatgtcaacgattagtcatgcaataaatgttctggttttaaaaaatacatatctggttttggtaaggtatttttaatcaattaggcttgtagtatcagtgaaatactgtaggtttagggactgggctagcttcatatcagatttacttgttaagtgactgttttggaatgtttacttttggactgggtttgtaacacggttaaaggcaatgagaaacaagcagaattccaggagtccttgaagcagagggcactggaagacaatatagcagattaaaatagcacagctcatgtggcataggtgggtattttagatgtttgagtaaatttgaaagagtatgatgtttaaattacctttagcaacatgttcatctgctatgctgtcatgactagggggatgattattagtcacatagagcttgggagtaccactggaaacgtatgggtaggagtttaggtggcttctgtttttcaaaagatgatcttatcctagtatctgtaatgctcacttggcacacctgacttgtgggctgtgtgtaaggtggctagctaagtgaaaaaagcctgctaggtgtgagtcaacttaagaatatgtaaataggtttgagaaaaagtagggcttgggtgcaagtaaagattgagcaggaaataaaggaaaatcaactataatccctgagatttctagactaaaggcaatgatgtgggactacttggtcgaatttttttagccctcaacttggtaattgggtgtttccgtgttaaagcactgaaacttgctgtcgtgccttcctagttttcgtggtttattgacagggttgggggttttttttgtttttttaaaatgaagggacaaagtcaactggactgctgagtgagagggcaggggcagttgaagggaacatgaattgctggaacagctacataaaatagtgatgtagccaagtcatgctatttaaattataattctccactgtgtttagaataacatctgaggttcttaacctggccttggaagggtatcacttttacttgtaacctggaatggctttataatgtgctagctaattgctactctcatcttgtattttaactcctaatttacccttcaggtctcagcttcagaacattcacttataaagaaaccctgctgattaaatctctcttgggcttcctcccgaaatgtgagactatactttaaagatgtatggttagagtccaattgccattgcctttcttgtttacagatagtgcaatggcgcaatcctggctcactgcagcctctaattcctgggctcaagtcaagtggttctcctgcctcagccttctgagtagctgggactacagatgcacaccaccacacctggctaatttttgtgttttttgtagagatggagattcactcggctaattctttttgtattcttagtagagactgggtttcaacatgttgaccaggctggtctcgaactcgaccttgtgatccgccgcctcggcctcccaaagtgctaggattacaggcgtgagccaccactcccggctgtcatcatcaaattttcaagtgaagatagtctgttgaagattgaacaatgaccttgaaagacagctgagttgctgtgggtataatgtaaagctggtgaagtttggccagtttgggcttcagaagtctaagtctagtgaaaataccctgacccccatataaacaacccttgaggccggtgtggtggctcacggctgtaatcctggcactttgggaggccgaggtgggcggatcacaaggtcaagagatcgagatcaccctggcccacatggtgagaccccaactctactaaaaatacaaaaattagctgggtgtggtggcatgtgcctgtagtcttagctacttgagaggctgaggcaggagaatcgcttgaacctgggaggcagaggttgcagtgagctgagatcatgccactgtgctccagcctggtggcacagtgagactccacctcaaaaaaaaaaaaaatccttgaactaatgactcaaattttcaaatgaaacaaaataagcagtggatcttgcattggagatggagttaaactatgttgcccaggctggtcttggactcctggtttcaagtgatcctctcatcttggcctcccaaagtgctgggattacagggacgagccgccacaccccacccattgtctatatttctatctttaacagcacttcagtcctgccttaagttatagttatgtatagatacccattatactttaaatttttcagcagaaattatgcttttatcttctctgcagtgttaaatttatttttcctaagtaccccatctgcttttcaactctgtcctctgcctgaaaagcctccctccagcccctacttccctcccatcttagttcacaaagtcaggttgatttgcccccagctgtcaaagcagactacctgtttccacatgtaactggttatgttctgtaaagttacaaaaatagaaaggttgaatctgtggcggtcgggtacggtagctcacgtcctatagtcgcagcactttgggaggccaaggtgggcagttcacgtgaggtggggagttcgagaccagcctgaccaacatggagaaaccccgtctctactaaaaatacaaaaatattagccgggcgtggtggtgcatgcctgtaatcccagctactagggaggctgaggcaggagaattgcttgaacctgggagacggaggttgcggtgagctgcagaggcctcacctctaattgagacacaattatatattgttgatatatatatatatgtatacacacacacacacactatgatggataaatgcatgagttcctgtgagagcattggaaaggagtttgtcactcaataggtgaagccaggctaagatttaagctgagccagggaggacttgaaggaatcatgatgagagagaaggtaagtggctttgccagcaatgaaacagctgacataatggtaaccagtcagaggagggcataactatgaaactggacaccttggttgtcaggttagaaggatagggtgtagggttggtaagaaaagaattcagggaagagcagcgatcagattatgaagaatttgtcttgagaaattacagaggatttaaaccagaatgttaggaatagttattctagcaagatgaatgtggaaagtgttagtgtgcatgtgatgagtcttgaagctggaaactaggtaacaggttcttaaatagttcatgtgaaaatcatgacagactaaggcagtggctgtggggctgtccgggagttctctacagaaaacatctaaaacttgaatgtgcaagtgagtagctaacttccaagcttcccatttctgtataatttaagcatgaaaatgagaacactgagatttgataggcatgtagaagtcagagtaagcaagagggcttgagttcaccgatgaacttcagtaactatccttgacttagtattggtggaaaccatttgtgaatttacagactccaaaaacaaaaagataatttagagtctcaaagtaagatttggggagatgtccattggagacagaagtggagagagggagaagttcatttgttgacatatttatgtatggtgcacctactgtgtgccaagccatgttagagatacagtgggagcaaaaccagacgtgttttctgccctctgactccagtggttgcagaattagcccaggaactagaattggatggagtcacacaaaccaaggaaggggattgtttgaggggggcactcagtcacatgtggctgaggccaaagagaatgaagatatattttaaaattctggatttggcaaaatttaggctagtctttacttttcataaacctctctcatgttagagcagcaaagaaaaaccagtttgccaagaggtcaggagattgggcagtgaggaatggggagtttagtttaaaagacaacactagatacttttggaagtttacctattctgtggttcccttttattgactaaatggtgcccttcattcatgaagcaagtatctatttagtgactactatgtgtcaaaagctattctaggcccagaaacttttaagtggaaaacaagacaaagaccctgccctgacagatttcaatcatgtatatactgtatgtatgtttgtggaaggtgacataatagacaattgcagatagtgataagtgtgtaagacaaggataccacgagcgtaatagacagtggggatggaggaacctttagaaggttggttaagttgaatgataaggagccattcttttgtctttacctgaatgacttatcattcagccctttttgagttttgggttgcttgcagagtttaaccttgcctgtaattgaaacttaattttgtaatagcataacttcatgtaagaaaagcaaaggaatacattacagaattattttactgaagaacttgtttcagagaaagaggctgtttcatatttattagcacatttggattatatttaggtgttttattttttttttaaacaaaggagtttggatcataatacaagagaagcacagggcaaagacactgcataacctcaagaactaagaatggaaggactggccaggcctggtggtgcacacctgtaatcccagctactcaggaggctgaggcgagagaatcgcttgagcctggggggcagaggttgcagtgagctgagagaacggcgggcggcagagcgagactccatctcaaaaaaaaaaaaaggataaaggaaggacttaagcaaaatcttccttgtaagtagaaggatgttttgacaagaaaagttgcaatggaaaaatggttctcatgtacacgagtatgtagaataagcatcgtgtgtggattggattcagatcaaaacattgcttttatgtttgtgtctttatacggtgggagtataccctggtgccccaggatgaagacttgacctgacccatgtatttttagattactcacagataacaaaaagtattttcatcatgattagttgcgaaaacagttttatttcaataggtaaaacgtgcagtcctatgtaatcgtcagaaggtaatcttaattatagcttgggtgtgctttaaactgcaagctggcagtggagggcacgattcctctgatttcagctttctccttatacttttctggagctgtgagctgcaagttaactcagtgggattaaagtgtagactggaggtacaaaaggtgaggagtgaggagatagggtagttcttccttggctggctggcttcataatccctgggccccgcagataattaaatcgactttttctgtctcaggcatttgtatgacctctttggaggttccctgctgggtagttatccttgtatctgatggacccatctcaatttaaaatactctgccaggttcggaggttcatgcttgtcatcccagcactttgggaggctcagaggtgccattggcttgagcccaagagtttgagaccagcctgggcaacctggtgaaacctcttctccattaaaaatacaaaaaattagccaggcatggtggtatgtgcctgtagtcccagctactcagggagctggggtggaaggattgcttgagcctgggaggtcaaggctgcagtgaaccttgattgtgccactgcactccagcctggatgacaaagaccctgtctcaagaaaagtctgtaattctttcctaacccttagtatccagcctcagtcctgaggttttctttacctctgggggctattttatgccggctctctcctgagtgtcacacatctggtcctcaggaaacattctcacatccctggcctgaaaaaaacaatttcagggagatcgcatggcagcagccctctctgggctccccagctaaatggttgtacgaaacacatttcaaagctctctgaagggcttccttgaagttcctttcactgggtttcaaagtagaaggtagtaactcctttgtccaagaaggctgaattgagcacttaacaattctccaaagaaatttcttcattggtctctatcctagaccccttctgtatccttgatatggctgaggattctaaaaaatgaccagtcttacatgggagggctgggatataaaaaataaaataataaataatgataaaaactgaaaactgaccacgttcttggatatgttttctttgggttgtgtgtgtgtgagacttttgatagttacccaagtaggaaaaatcccattctaataaggttatatttatgtagctctgcaaataaacatctagcaaatgtaaaaagtattttctttgccttaaaaatgattaaaattatttgaactcctgaggagtgttatatgaataaaattagtaagttatttggaggaaagttattttttaaaaagacaactggtaaaacagtacaggagaaaggccagcttcctcaagtgaggacagttgtttagaattgactgaggagcggccgggtgcggaggctcacatctgtaatcccacacgccttgggaggctctgaggcgggtagatcacctgaggtcaggagtttgagaccagcctggccaacatggtgaaaccccgtctccactaaaaatacaaaaattagccaggtgcagtggcacacacctgtaatcccagctactccgaaggctgaggcaggaggatcacctgagcccaggaagttgagactgcagtgagctgagattgcaccactgcactccagcctcagtgacagcgagactgtctcaaaaaaagaaaaaagtgactgaggaggaagaggccaggtggcaaatggaacagaatcaccaaagggtgaacaggactaaggcaatgtagtgtatggctcagctacgtcagagtggaaaaggtgttattagagcagaaactatggtccctgcgtcacagggaagcaacctacagagaagcagcagctccccagagaggagagataagaagccagaagcctcagagggaacattgtcctattagggattgctctagagagagaaacctctgggaacgtacccctgtgaggcagcacagcacaatgcttttagaattgtatgagagttgatatatctccatttgttttgcaaaggcaaaaactaagatacagagagattatctgttaaagttatgtatttctttggtaataaagatgctgacagtgttgctggaatgcatttctttaataaagatattgtacaatgaaatactacttttg

SEQ ID NO: 798 - DNA, 7348 bp, Homo sapiens
aactgacgaaactcaaaggaaagaagggaaagatgaggggtttttttttttcataaggattgggtgttttgaaggatttcaaaaaatgacagacatttcctagcagggaaagttgtcggatgttgacaaaattttcacagtgggaaagctgtgagatttctttttctggggaagattttgttcttgaaacaaaaattgtatctcagttgacttgttttttaagagtatccttacctagagccatatatgtcagcctctcaattgccctcagcccagtggtttatatatacatcctcagcccaaatgagaaagaagaaaactaagttcatgtaattttgcattacaaaatggatacagtgaattttaccacattcgtcattatccatctgaagtgtcaccgaatgagatgagtctgttggtacagatttaaaatgatccttctctatttctagtgctgccaggtgaacattcacttgggccttcaggtcctcagtcttagaaatggtgggaagacatggctgagcattctttattgttctttttggccacagggaaggtggagttgcagcaagggctacgggctgtgtaccacaacatgcctctgatatggaaaccaggctaccttgacagagcccttcaagtgatggagaaagtggctgcctccccagaagacataaagctgtgtagagaagcggtatgttcttcagctctaaggcagtgagatttagccatctgtttcccataacctgagctttaaatttgttttcattgtctttccactacccctactttctatatgtctatagaataggtatttatcaagtcgaaaaaatgcaaaaccacaaacattttcaatgctcctgaccaaaggcactagaaaatatgattaacattgatttatagttcattgtctaggaaaaaaaaactattccactgcctcgtccctcacctccttaccaaaaaaaaaaaaatctcagtgggaactcaagagagggtaaaatttcattttaaatatgtttggtgtttttgtaataccatgtagtcctgagaggctacatagcatctttccccataaaagtcctcaagaaatgaatctggggaccagagatggaaccatcttaaaccattctgtgtgaatgtgtgatgctgatgagatctcggtcagatgtttctttcaaagttctaaggtgttcactttaccaggacgagaacactactctcccaccagccccaaagctcatgcctcttggtcacctaggacccttgatggtatgaggttgctcgaactccaggagacatgatgcgccttacaccccacaggcagctgcagtgtctgctcctgtccaaacagcttttacagccagtgtgagtcctgagaaggacattggttgtcttgttaccatggcttaaaggtcaccgtagagccacatatttgttttttcttgactctggttgctagagtcatcccttggctttcatttcagtcctgaggtggtcaggtctggtgtctgtcctgtcaccttatacttatgtctagtgaatcattatgctctttgccagacgtttataacaaaggatatacatttctcactatacttgttttaaccctgctgtagtcagtactggtaattgaaaacacaaaattatacataaatcctttgccagggaaatattccttccaatctcagccagatttgcattctttgcattctaacagtagaaaatgagttcacatgtcagcaagaatgtgctatgtgtccagtttggatgtgatgtattagtggtattaaaaggccttggcatatttttaggatttctgttctgatatgacatagacaggattaattcgtttcaggtaggtgtttctactggccttgctgttgttaatatcccatttctgatgattaggccctctgtgggtcaagggagatatacctcaaagtgaaagtagaggggagaggggtcaaaacaaaaatgctctatttttaaatttacttcctaagtcacagaaatcacctcattcaaatgaatttcatgtctgcatctctggtctttgccagcagcttatgtggattacactgatccttaatttacagataccatgtgagctaaaaatctttctgagggggacccttgcctgtatccagaggctttaacatacacttaaaatggcctttggttggttgtgttctgtaattgcctatccctttgtcccaaatccaaactgattgaggaagaaagacatggaagtgggaggtactttagtgcccatcaagcataattcctggattcctgtctggctaactaaaagcgaacttagctgccattgtgcggattcacttatacaaataattcgtagctcgcttatttggcattttgttgttttgtctttgagacagggtctcactatgtcacccaggctggagtgcagtgatgtgatcatggctcactatagcctccacctcccaggctcaagcaatcttcctgcctcagcctccttagtagctgagaccacaggggtgcaccaccatgcttggcttttttttttttttaagtgatggagtctccctgtgttgcccaggctggtctcaaactcctgggctcaagcaattcttccacatcatcctcccaaagtgctgaaattacaggcatgagccaccatacccaggctagcttgcttatttctactatttgtcttgtactgttttccacgccatctgatagggtgtttataatgtgaaaaaatataaccatttatatttcctacaattttataagagaaatgttttcacagtcttttagagctcattcttcctttctttcgccttctctagcctttcttcaccatgtgcttttgggccataaaacatttggttgctgaccctctttctgctccacagctcgatgtgctgggtgcagtgctgaaggctctgacttcagctgatggggcttcagaggagcagtcccaaaatgatgaagacaaccaggggtcagaaaaactggtggagcagttagacatcgaggaaacagagcagtccaagcttcctcaatacctggaacgatttaaggtgaatcatagcagaacgtgtctctcttagcagcgcataaaacacacttctctcctgtggtgatggataagcattctttctgcatcaatgtcacacaaagaggcattaaaaactgacatcaaaaattacatttttattgctttgcacaggaagtggtcttaaaagaaaccaatggaatttttatgctcctttttgtacttgagctaattggtcacagttttgttcactaaggtggcatgtcattacccacttattcctgatatgcacctgtcagctggataattgcttgcctcctcatagcaataacctgactcccaccccaggtggaaagtatctggccatttctccatcttgcactaaatgtgcttgataacctaaaaacccagttagacactataatgccacatttgagtgtgtagagataagacgtgggcatctttctttgctcatctttggcagctttgtattgttctcttgtgctgcatagaagctgtaaacagtttgcattgtttctttccagaacagccctgagcactcaagctacctttggtagcttctaactctgtacatcccaaaatgctctgtgatcagtgtcaggaaagaaccgtgttcagtgtttgaactcttggcttcttagctgctttgattcttgtctagtgcaaagggggaaaaaatgctgtcagaatgggaattcttggtacagcaaaaaactttcccacttgttttgtgtaacttgtgtcattttggtactgataagatgtaaactttgctagattattatgtttaaatattttcagtaattagaacctaattcccagtgttgtaaggaggagcctgttgtatttttagcagcaatttctcccagtacttctgtaaagtcattgctcaacttccctcttataatttgaaactgagaaagaaaggttaatcgatattcccaaggtacccagagaattggcagtatagctgggatgagaatttgcatgcctgccccttcaggctctttgcttaatcttgtgtatttacaaaggctaaagaaaaaaatctccttagccccatatattatgattcattgcattcacattgaccaaggttgccataccattcttaaaaattaaaacttccttctcttgtttcttatatactttgcctcagagaatagaaacctgtgcctgcattaagttctcagccctcattcctctacaaatgtatttttatgaaaattttaaaaaggcaagtatttattgactactaactacatgttgggcaccagtgcatttctcctcgcaagagctctggatgctagagactacctttctcatgttagatgacagcaaagctgagaaaaactagcccagagtgactgactttaggtttgaacaaaagtttgccaactcgtagtttagtcctcattctggtgtcccaagctgtcttgttggcctcaaaccccacatggagagcgttgtcagagagagatcattttcgttttacatttccttttcttcctgttgcctgatttttattagtcagaggtcatttgtttgggagccatttttatatgattgactctcacactaggcctctggcccctcctggagcctaggcaccctgcccacccccaaccctgttaagcaagcctcctttcctgtgccaatgagtggcatttgtttgtggaacatggggatgtgtggtataagctacagctggccccgtaagtggccctctctctaatgagagagtacatcttaaagtacttaaatagattaatgtttttaatacttacttctccaggagcacaacaccaaccaaaccaaggtgccatttcagatggagctgtaagcaggcaatacataaagactgacctgcagtcttagagttcctaagacccaatgcagtggagcacagcaggcagacgcttctaacggtgcaggcactcaggggagctattccttgaactgatttccgtctgttgagaggaatgccagaaaggcaaatacttgtttcagttattccgaaggcacatgtatggttgggcttgctccagttatcagatgcctctgccattttgtttgcatattagaattcttatttttggtgtttgctgcttggtttggttaggtcagggtggaaacatagatttgttagaggctggctgtctttgtggtttaaaacaagaaattacacagggagacacagcatatggagttccatttactgtttttgagtgaaaggggagaaatcacatgtggtgcatcttagcaaaattgctgagctgaaaaaaataaccacagctaacagcacctgaatgaaaggcagcatgaccatttcccaacaaaatggtttttttctaccagcaaaatgtgtggttattttgcaggtgacttcattctgggccactagaatgaggactaaactacgagtcagcaaacttttgttcaaatctaaagtcagtcactcagggctagtttttcctctttgtatctttctctcacttctctacctttcttctcatttttcccatttgtttccaacaggccttacattctaagcttcaagctctgggcaaaattgagtcagaaggtcttttaagtctgaccacccagcttgtcaaggaaaaactctccacctgtgaagcagaggacatcgccacctatgagcagaatctgcagcagtggcatctagaccttgtacagttgatccagagagaacagcaacagagggagcaagcgaagcaggagtaccaggctcagaaagcagcaaaggcatctgcctaatagggtcccccagggccccacctgtctcacaagaacttcactcaaccccgtgccaggactcagcagtggcctggacacagcctcagcttcctctacccatcttcttttcttaaagcaggctatgtgccctacatgtgcaaggcaccatgactgcccatcgagatgccaagaagggctatggaactatgcaggtggctagtggtcagactgaagtcaccagctgaataccttaaggaggactcttgaggctcataatggagttcctggggcacagggattagttatgagcattaaagttcctaagacccagtgacagtactgggagaaaccaaggctgaagagtcaggttgaagcacaggcttttgttttttgttgtttttgttttttgagacagagtctcattctgtcacccaggctggagtgcagtggcgcaatcttggctcactgcaacctccgactcccaggttcaagcaattctcctgcctcggcctcctttagtaggtgggattacaggtgcataccaccacacctttctaatttttgcatttttagtagagatggggtttcaccatgttggtcaggctggtctcaacctcctgacctcaagtgatctgcccgcctcagcctcccaaagtgctgggatgataggcgtgagccaccacacccggccaagcacaggcttttgaatggtctccctctccccagcccaggtacatgaggccaaggtgaactgtgcatcctgagaccttgtgtccctgagtctcctttctgagtgcaagctgcactgtgagctggctgtgggatactcacacattcccacattctcctttctgccacatctcgcccttctggacctgcactgggagaaattcaggacaggagtgaactcaaggccatgaactcactggatttccatttttaggcacccatagggatgtttttaggatgtaagtttctgaggagaaagctagctctagcatgaagcttttttggattggcttctccatcgtgttggggtaacattttttttccaattttttttttcccaaaacatcgtctcagctcatttatcaagtaggtaaaatgagccttttgtgtacacacagaggcacatgtgcatgcacacacaacttgtgaacacacatttctgttaaagaagttagaaaatgagagatgggttggggcttgaagtgcatcagaggtatgaatgttgtaaaactgtcaggagatgtaaaattcctttctgaagtgtctcttctgtgaaagggttcagagcagattttgcttactatgtagtgttgcccttaagtacagtggtgtaattttattcaagattgtgctcttctatcaaaagcctctggaaataaatgttccgggatcatgttagtgtactctttatctttggggaaagggaggagggagagggactcattattgttactatgattttgaggagtgtactttaaaccctcccccattaaactatgggatttattgtaataatga

SEQ ID NO: 799 - DNA, 609 bp, Homo sapiens
catgtgattgcaccaggaggtgcagtggtggctttcctcttgtgccctgattgcattgaaaatcagacaggttaagaggacaaagccttctgaagagtggcctcggaacctgggttgtgtggaatctgggtaaataagattcaacctaaatgtaacgtcccgatttacagacgtttattaaatttatgttatttcattactctcccatcgtctcttaagtagttaggcatctctcaattatacattgcttctgcttacctttgttttttaaaaatcataaagttatagcagtttgactgcttttgaagttgatctttgccaacagaatgtagtgtgttattcttggtgctgattctgatataataactcaggaacttcagagtttattgactgtctatcagactaacaaaggagttgaccactctttttaaaaataattttttccttatttgccacctacttttgatattgatttacatgtattttcctttgctttcagatcagcattcaggactgtcatacagcctgaattggtcagaagtgacagggcaaagaatatgtactttgttgtggtttgtgagcagaggccctggttctttgtgatagcag

SEQ ID NO: 800 - DNA, 455 bp, Homo sapiens
ttacctcaactggatcatctcccagtaacaaattaccttctgcagctgacctgccatagtcacagccaaacctccagcctcatcacgaatccgagatcttagatcctgaagtccccactctcccaggctcgtctcgtaccatgactgctgctgaaccaacttgctctgtaatttcctgcctgctaatccttagcctttaccccatcacccaaactcttggtctccagaatctgcttctcttccagtgtgggccccatggtcagccatccccatgttctcattagcatcttcattttctctcactccctttatctaggctcacttgccagccttcgacctacatccttgcacccatctattatgggtagaattgtgttccctaaaaaaggtaagttgtatccctaatccccagtcccttagaatctgaccttagttggaaataagtttgtactgag

SEQ ID NO: 801 - DNA, 608 bp, Homo sapiens
aatgaattgccaaattgtttgttttattcaagactcattctacttgcaagcaaagtgtatttgtagtcctatgaacagtctcctcgtgtatctccagagactgcatgtgcaaagtaaaatgcttcatttgccacatagttgttgtaatatttaatccagtagcataacttatatctgtatttaaggacttttgtgcaatatggtcttaagaaataattgccaaaaaaatcggccatggtttgcattttttaacataatctaagacagaaaaaaagcaatttttactatgtaacaatggtattcaacattctatatactgtgtttagtacactaattttgaagccaatatttctgtacatgaaaaagagctatttatctctgtttgttggaaaatcctaatggggattcctctggttgttcactgccaaaactgtggcattttcattacaggagagtttactatgctaaaagcaaaaaacaaaaaaaaaaaaaaagggaagaaggaaaaaagcacaaaacaatttgaagatatcctatctcaatgacaaatcaaaagagtgatattgcttttaactgtaatagaagaaaatgaatttatgtatatatca

SEQ ID NO: 802 - DNA, 366 bp, Homo sapiens
cattttttaatttattaaacatattttttaaaaaaacaagtttgggggtttctttttaaatttattttacttgaaaggttggcatcacaagtttctttttccataaacttaaaacatttcaaaaatggtttttttaagcaagtatgattttctaatttatatagaattcaggagacatgaataaaagggctattatctattccctatgcaaatattttaactgttgcagtgtttgacaaaatgggattttttaaaaattgcagagtagaaaacaaaatattctgtttacactggcgttgctgactatcctaccatattcagcacttttaaatacgttatttatgaaaatgcagttaaaatgcaaga

SEQ ID NO: 803 - DNA, 2461 bp, Homo sapiens
ctgagattcttgagcctttcagtcagtgtttgatctggccattcaggaaggcttattataaactaatgtataactttgttcacaatctcgcaaagtttccactgtctgaaaatcctagtgcatgagactcctacatcgttattaatggcatatccttaataaaagtttggcttttgatttttaatgggttttcaggagataacttcccaaagaggcattagatagtttaacagagcctgtcattaatgtgacctgtgagaagacttggctagaggtggtgaaatatctttcctctatccctcccaaagacaagaaaaacctatggatgaggatgaaaatttggcacaagagcaatcattggcggaagttgaatctgaaactgttgacaccaattcaagttaatgctgctagaggctgatcctcaggaagctttcttgtctccagaggttattatcataagtgatgatgaagacaattaggaggctgtgggactggaaacaaatacagcaataagaaacaggagcaaaatttttagaacaagattaaaacctccctaagaaggtaattaaaattggcatctttacatgtgtcagatattacctgttcaaaatttgagtgacttagagttctataaagaggtgctatgatgccatcaaacataatcatattggacagaaacaatcttcaatagaacttaaatcatgtgccatttaatactgttgctggacagctgataaaactaccttctgacaaagtttgatttaattagactctaataaaaggtcctatgagactttctaaaagactatattgggaagaaagaaacctcagaaaagtctaaattatcaagtagtaccatttaaatactcttactggacagctaataagctaccttcagacaaagattgaatgattaaattgaactccatacagaactgctaaggtgtcttcaaaaaggacttgagaagatgaaagcatctttagaagggccacttaaattcacttgcttgatagaaataaagcctcaagcaagttgttataacttcaggattcgacttcactgactctaagagtatagacatccataatttgaactaatgaatagtccacttctgttcattgcttctctgtcacccccatttgccactaccataatgagtgatagatacatcttcatcacctctggaaatcatctcaggatctaaatggaaactgtataaagcctatcatttttactgatttaaactatgtaaactcattattctttttatgtaatgtgctgttgttattgtttacctgcataaaaatatttatgagggttttcaacagtttacttgagacctcatttttgcccatttttttccttcccgatatcatgatctcctcagctgaactttcttaccttgggggttgttcaggaactgactctcatggggaaagagggattactatttctgtgttcctatctcttggtaactgcttaaccacagtcagtcttgaactaatggaaggagcactggacttgggttcttgagacctgggttcatgttcagttctgccactgattattgtgacattgggccagtcacttgatttctctgagcctcagtttcatcacctgttaagtgaggatagtaatacctggcacaaatatcacaatattagtgataattgaatataattataagtacccaatggctattaaaagtaaaactaggaagtgctgaataaccataatatcattatatttgtagcatttaggaccttatcaatgaacaactgagaaactagggttttgaattcttttactttttaaagtaacttccctccatttttatgtcaattatagaaaattttaaaaagaaaattaaatgtgcctataattttataagccggaggtaactaagttggtatttttcttcttagtacctctttgtctcatcataaattgttcatcaatgtcaaaaacttggaaaataaagataagcatatagaaaaaaataaaaaccacccataatcacaaatcccagaagcaatgttaatattttggtggatttatttccagtctttttctatggctatatgtgcacatatataatttttacatagaaaaagtcataatgcatacagctttgttgcttttagcatttttatcatgaatattttcctacatttatgcaaagtatttgtaaatatcattttcaatggtgtataatatttcatcataggatgacatcatggtttagttaaccattttcttttgttggatatttgagggtctttccaaatttggccattgtaatttcacaatgtctttttcattacctaactgaaaatatttgctttggtgaaagcagaggattttttgttgtttgtttgtttgtttttgaagaagtccttttaatagctacatttcattgactaagtggaacttcaagagacaggtagaagaaaaaaaaaa

SEQ ID NO: 804 - DNA, 473 bp, Homo sapiens
ttgttgggagtaagggatggtttgaggaatttagggtgtaccataatgtggagaccaggtcttatttgacagttatgccaaagaacaaacagttcctgcagctctcatgttgtattcaccacaaattcaggaagtggctgaagaaggggattacatgcctgcacaaatctttagtgctatcgagagtgtcaagctttgaaaccctttgaatacttctgaagagcaagcgcccactgatgctgaggtcaacaaaatcagagaagctgacatttccattttttgccaatacttcaggtgacctcataatgaaacccttgctgctctacagaaaattgtgcccaaaccctctcaggggaaataaatgagccaagtttccagtgtactagcaagcaaacagaaaagcccagatgaatcttcctctccttaagggatggtttgaacagtactttcttgtggatgttcaagactactta

SEQ ID NO: 805 - DNA, 1171 bp, Homo sapiens
gagaaagatcccctctctaaaaaaacaacaagtgaaattacaaagtagctcacatggaatgaaaaggaagacacacgtatgccccgaaagcatgcttgaggaaagtgaaaatatagcactgaatgcctatagtaaaaaagaaagatcttcaattgatgactttagctttcacattaaaaatctaggggaccaggcactgtggcttatgcctgcaagcccagcagtttgggagactggggcaggcaggtcacttgagtccaaggagttcgagaccagcttgggatccacagtattttggactacttttttactgtgaggaagggaaatgagaaaataaatgtagagaactggcatgaagctaactttgtataatgattgaaccctgagacagtggcctttctatcaagtttctgagatccttacttggcaaaataaaaacccggcaatattaggtcagtccccattttatagaacattttattagttcatgaaacaaaaatctaggaaccagttctttggggagtgtcaggaagcggggagggttatgttgggaggaatcacttctgaagagagatgaatagggttgaagatgaagcagtcaagatggttactaagcgttttataaccaggtgttttggtttttaaaaaatcaggcatttctgtgcattagagcctgctgctgcctccaggttgtaaacagtgttctaagggccagccacagtgaaatccagtgcagggctaccatcctgatagagcggcttggtaccagtgtcccacaccccaatgtaggcattgcccatggggacgagaggggacatagacactccttgggggccttttgtgtaggaaccgtgaccaccagtccagtgtctcagtctgtggtctctcctttaaagtaggaatcttcctaattagctgatcactctcgttcttcctggactccccagtgtctttcagaaatagcttctggtaagttgcagcttgctcatgatgggagggaaggaagaggaagtagaacagtagaggcagaacaattaaaaataaatggtgaagggcctggtgtgtggctcacacctgtaatcccagtactttgggaggctgaggaaggaggattgcttgagctcaggagtttgagaccagcctaggaaacatggtgaaacctgtctctacc

SEQ ID NO: 806 - DNA, 3581 bp, Homo sapiens
cactactgaccaaggtggctgaatttacccggaaataacccaaatagcagccacaacaaaaacgacaacatacacgaaacaatttttaaaacactgggcaccaagcaacaaaggacagtaaactcggagaagtgacagacaaaggaagtgagccctacagtaccctagctgatctccttgagagagcttccacgccatggcacagggaggggagccacgtggactcccagggttgtgggtgtggagctgagaatctggagagaccaatgtggctagagtttataggacagagtaccagagaggagagagcaacacagagagagaccctggggtctgcagagggtccccttgatcagcacacgtgtgtgaggaaactctctgtggctggggaaagaactgtctgaaaagatcagaagatacagtccctgctacttagagcaagattataatttactggtagaacattcaggaacagcatgcttcagtagtgggaaattccaggtgtatgggtttgtgagggctaccataacaaagtaacacagaccaggtgacttaaatggcagaagtttattttctctcgattccagaggccagaagtccaagatggaggtgtcagcagggctggtttctcatgaggcccctctgctttgcctgtagatgaccaccttctccatgtgtcttcatatggtctaacctctgtgtgtggctctttctgcatttcttcttacaaagctgagtcatagtggattagggtccaccctgatgacctcattttagcataattacctccttaagaccctctctctaaatacagtcatattctgaagtgctaggggttaagacttcaacatacaaattttgaggggacattattcagcccatagcacaggcatgcagagtgggaggaaactatgatgtgtatataatgaagagaataatcaatgaaaaccgactgagtactgacacgcacgttagtgttgaagagaagcacattaaaacactgtaggctgggcgtggtggctcacacctgtaatcccagcactttgggaggccgaggcgggaggatcacctgaggtaaggagtttgagaccagcctgaccaacatggagaaaccctgtgtcctgtctctactaaaattacaaaattagccgggtgtggtggcacatgcctgtaatcccagctactcgggaggctgaggcaggagaatcacttgaacctgggaggcggaggttgcagtgagctgagatcgtgccactgcactccagcctgggcaacaagagcgaaattccatctcaaaaacaaacaaacaaacttactgtaattgtattccatatgttctagaagttaagtggagagtcatggaaaatctgaaaattacccaaattgaatttctgaagatgaaaaccataatgtgtgaggtaaagtttacactgaagggaattacattgaagggcagattaaacactgctaaagaaagagctcaactattcaacatgaaacctggggaaaagagaaccaaacagattttcaaaagcatcattactaggccaggtgtggtggcacacacctgtactccgaccatgtgtgtaatcccagcacacctgtaatcctagcactttgggaggataaagaaggaggatcacttgagcccaggaatctgagaccagcctgggcaacaaagggagacctcatcaaaaaagaaaaaaattgaacaattagccaggcgtggtgtgcatgcctttgattacaactaattgggaggctaaggtgggaggattgcttgagcctgggaggtcaagactgcatgagccatgatcaagccactacactctggtctgggcaacagagtgagaccctgtcaataaataaataaataaatgcatcactatgctatgggacaacttcaggtagcctattatactgataattaaagtcctcaaagaagaggagaaaggagagaaaaaatatttgaagaaatagtggccagaaactttacaagcttggtgaaaactgtaaacccactgctaagaagcttaattaatctcctgcataagaaacatgaagcagtataccaaggcacttcgtaatcaaattgctcaaaatcagtgataaagaaaaaaaaaaccttcaaaccaaccagaggaaaaaagacatactgtgcacacaggaacaaagatatgggcaaagaagttttcttaaaagaaaagtaagtaagaattcagtgaagcaacgtctttatttttttaatttttttttttgagacggtgtctcagtctgtatcccaggctggagcacagtggcacaatctctgctcactgcaaccttcatcttccggattcaagcaattctcctgcctcagccccccaagtagccaggattacaggtgcccgccaccacacccggctgatttttgtatttttagtagatacagagttttaccatgttggccaggccggtcttgaactcctgacctcaggtgatccacccgccccggcttcccaaaatgctgggattacaggtttgagtcactgcgcctggccttgaagcaacatctttgacgctgtcatgccatgtagtaatgtcactcaatatagtaatgtcactcaataacaggtacaccttctgagcaatgtggtgttaggcaagtgcattgtcacgcgaagatcagagtgtatttacacaaacatagatggtacggcctattacacgcctgggctatgtggtaaggcctattgctcctaggctgcaaacctgcacagcatgatactgtactgagtcctgtaggcagttgtgacacaatgttaagtatttgtgtatctacacatagaaaaggtacagtgaaaatacaatataaaagataaaaaacagtacagtatagggcacttaccatgattggagcctgcaggactggaggttgctctgggtgagtcagtgagtgagtggtgagtgaatgtgaaggcttaggacatgaatatacatttttatacaacttgcagtggtttgtttataccacatcaccacaaatgtgagtaatgcttttcactgtgacgctacagccatgacattaggcaataggaattttttagttctattataatcatatgggacaaccattgtataagtggtccactgttggctgaaatgctattatgcagtttgcatgactgtactgaaagaaaaagctatccgtccaaaattcttgaccaggtgaaaataactttttatgttgtcattcctcccaccccaaatatcttcaaaggcaaaatagtgaagttttcagatataaaaaagctgaaagagggccaggtgtggtggctcacgcctgtaatccaaacactttgggaggccaagatggaaggatcacttgagcccaggagttccagtccagcctgggaaacatagccaaactggctatgttttatagactccatctttacgaaaagtcaaagattagctgagcatggtggtgtgcacctgtggtcctagctacttgggaggcaggaggatcacttaaggccaggaggtggagactgcacttaagcgcaggtgacagagtaagatcttgtttcttaaaaaaaaaa

SEQ ID NO: 807 - DNA, 4294 bp, Homo sapiens
tatagaaaaggagagggagtttttaaatctgacaacatttctactatctccatcctaaaagatgtgctttctaaagaagctacaaaaaggaaaattaacctcaacatatcatacggtaaacaaacaaaattaataattctttctgatgtttattttgtgttgttgttacattattaatgtttctgatcaaagtgatttatctaactgcatctggtcaactccttctagagataaatgaagtatcagtcaaacacactttaaagctaatccacccaaagctggagtaccagttgcttttggctaagaaagtgcagttaattgatgctttaaaagtaagtacatgtgtcgtcgtggactggtgattattatttgaagtcataggatttctaaaattatcaatactttaacattacattggattgaattttgaatattaaggtgcttctgtttttaattttaaataggaattacagattcatgagggaaatacgaactttctgataccagaatatcactgtattctagaagaggcagatcacctacaggaagaatacaaaaagcaacctgcacatcttgaaagactctatggttagtggaccattctagaataccttgccatatttcttttcaactggctatttcccaaggatcatgtaagagaagctgggcagaaagataaaaagattacatcagtcatgattcatgaaccagtcatgaatcagttgacaacaaatttattgcacagaatatttctgtattttgtcaagctacttttaatatttaattcttttacttgataaaatgcaagtatattaagaaataagtatactgtgatgaattaatctatatatatgaacaaacctggtataaaatgaatgtaatctatgaacctttagagcttagactgtatttcacacaaataattgtcatgttttgttgctattgtgaattataaaaatgcagcatttaaaatttttaaggcaaaatttaataaaggatatacagtatttgtgttgtgtcaatttatagttcaaaactttggtggtgagaagctgaatgtttcacaaattgtattgaaacagagtaagggaggtgaggagagggaaagaaggagtgaggaaggaagaaacagcttaagaaaaacaattttgttagcaatctttacataagacctgttgtatatagcacactatttacactgtcttcataatcaggtgagatatttaatccttacaatagctctgcaaggtaggtggtattatcttcatttttcatatgctttaactgaaatctgagtctaaggaatttgttgtcacctagcaagttagtgatcatgcctgcattagaatcttctcaccccaaaatgcatgccttttacactatgccaagccttccatagtcactgtagagccaattggtatcactagtacacatggatccttaagcctgcctactgaattttttattacatatccagagactttctcacaaactgtagctatatttaatgtcttaacctttattacatgacaagcacatgatctcttttatccttataataacttatgagattggctgtacataatatcactgattgcaaaatccagacagctttgtaaaccaaagtttttttcataaataatttgacagcaaaatcttgacttaatctgaattaatttaataacaaaatctgacttaaactgacatgaggttttatatatattttttgtttgtttgtttgtttgttttttgagacagagtctcgcttggtctcccaggctggagtcagtggcgcgatctcggcttactgcagcctctgccccctgggttcaagcaattctcctgcctcagcctcctgagtagctgcgattacaggtgtgcgccaccatgcccagctaatttttttgtacttttagtagagacagggtttcaccatattggccaggctggtctccaacccctgacttcgtgatctgcccacctcagcctcccaaagtgctgggattacaggcatgagccaccgtgcccagcccaaggttatatcttttttattccacttagtgcaaatattcatccgtatattttgtgccagaaatagtactatgttttgctattggatgctgctactcagtccccttggggttaataccatagtatattcctttcattatcttcctaaaataggaaaaattctgaaatacatcttgcatcaagctttttggataaaagattgacagcttgaattattcctgttttacatatgagaaaactcaaggtgaaatgatttgcccagatctttgaacctaggactatttgccttcaagtcaaatcccaagaatggtcaacatataggtggaatattttaattcagataagctgttaaaaatagaatctgcctagactatgtcaaaatggtcagcttggtggaaaaaatataccacttgttgtgatgttatatatactgatagcagttcaaaaatggccagtagttgattgtctgaattaatagcttgtaatcaattgttaagagggttattaggcagatgatttatatcttgaaacttgttttaaaatccccccaaaatgactatttttaaaaacatggcttttaggtttgtgtatgttaaatcatggaattacaggtgcttaaaaatagattatcaagcaattactttagtgaaatactgtgtcattaaatataactaatcactgacaggaaatttatgttttttctttaaaggcatgatcactgatcttttcatagataaatttaagtttaaaggcaccaatgtaaaaactaaagtaccccttctattggaaattctggacagttatgaccaaaatgcattgatttcattcttcgatgcagcatgacatacaaataaggtaaagtcccaaagaagtggtctgtttaaatgaaaaatgttaaaagagaattagaagttaactgtgtatgtactttaatttcaaatgcttttttatatctaaaaatatttgagatataatggctttttaaagtaatgcttctatttcttttgacaaattgaactttctaaaactaaaagagtctttttatttttaaaacacaagtagaatgatttaaataggattttaatgaatttttggcaagtggctgttttaatttttaaattgagaagtaatatgtggaaaattaaaatatattcaaatgtattacaaggtacataaacacataaacatgtagaccgctttataggcttcaaaatgtatttttatatattaccttatttgatcttcacaactgttgtaaaatttgtcaaatcatataagaaaactgattctcagtgaaattttgtgattaagaggacatgctaatattttgtaaagctgggaccagaacccaagtactggtacttgctttgtgtcctggttactatgtatgttgccagctagtggaaataacctaccaattgttttttctaggagataggattgatttgcaactgatattccttttgcttggtagtgttttatgactctgctgcagtttgtggaaatgctggacttggctcagtgctataaattgtagccaggaaataagaagagcttacacagagtcgggggatcttaattagacatgctgtaaccagtggagctattcagcgtgcttcaagtgaagagtgcagaaatagtgatgccatcttagattttcctacactagtatcttctagatctctttttatcatatatgacattaaggctacagaagttttgtgcattaatcttaattcatatttattaatttcaagggaatattgaaaggttttaaaatggcatacagataatggaaaataagctttatgtttcaagaagggcagactcacgaattttttagaaaacagtgcttcttaatgatatgctattatacttattagttatgtgcaagctttgtatattcttatatttatatataaatataaaaatttgttaaaggcacgtatagttaagagagttttattttaataaggtcatattgtttttactatgtttaaaaaactttacttctgaaaggaacataattatatctaggtcactagaacgtcattgtgttttttgttggttgccacagcttggggaaaaatagaaaaaaattaatgactgtatttgaatattttgtaatgcactgctatttattatatatatcaacagtagttcaaggtgccatcttaaattaattgcatcttcattaggaaaaataaaaagcataaaacacaatttctggttactatgaataaacgcctaaatgttaagatga

SEQ ID NO: 808 - DNA, 10060 bp, Homo sapiens
  SITE (6847): n equals a,t,g, or c
gcgggatacttgaactgcaagaacagccgccgctccggcgggctgctcgctgcatctctgggcgtctttggctcgccacgctgggcagtgcctgcctgcgcctttcgcaacctcctcggccctgcgtggtctcgagctgggtgagcgagcgggcgggctggtaggctggcctgggctgcgaccggcggctacgactattctttggccgggtcggtgcgagtggtcggctgggcagagtgcacgctgcttggcgccgcaggctgatcccgccgtccactcccgggagcagtgatgttgggcaactctgcgccggggcctgcgacccgcgaggcgggctcggcgctgctagcattgcagcagacggcgctccaagaggaccaggagaatatcaacccggaaaaggcagcgcccgtccaacaaccgcggacccgggccgcgctggcggtactgaagtccgggaacccgcggggtctagcgcagcagcagaggccgaagacgagacgggtaaagggatgcgggatatctgcaggagggtgggtcgagcagggtttggcattggcttagcaggcagagaagagtggcgagaaggcatgtcctgggcttttggaagggggccagggtctggagtgcagttggtgctggtgtgtggtttgccacagtaggagttctcccatattagcatcaggaccccgccaacactgtgtgtatgctgccggtctgctctctatagggggcatctgcctgtacataatggggtcaaaccaagctctaaaacgtgtagtcttcgctcagctccgcgcctttctctccacttttaaaccccaggcactgctgtaggactctgacccctatcctcctcacgcttaagagatgacctctactttagaaaagcgtgtacaaaatactttgcttttggcaaattccgccattttagccggatttgctctgttgctccaccctcgggcgacagtggtgaaccaacaatttttttgctgtctttcctaaacgtgtcacgtattggcctgtcacccgacccttcttgtggccctgataagttttgcataattccacctagtgttatctattgatagcctttgtgggaatgcctgtgacaaatgggaacatcccttctcttttgaatactgaaactcttctttgtcccagaaagtttaattcctgatagagtatttgggagaaaaagcaaaggccaacacccataagagaaagaatgcaagactagtaggctcaaagccagttattaatttttttttaggttgcaccccttaaggatcttcctgtaaatgatgagcatgtcaccgttcctccttggaaagcaaacagtaaacagcctgcgttcaccattcatgtggatgaagcagaaaaagaagctcagaagaagccagctgaatctcaaaaaatagagcgtgaagatgccctggcttttaattcagccattagtttacctggacccagaaaaccattggtccctcttgattatccaatggatggtagttttggtaagttttaaggaaaatctgtgtggaattacggtaattataattattagatgatattaatgatttgcattttaagatgtcttatgtagtcattttgactatagtgagttaggtttaatgtaacaaggcttagaaaggatgtgacttatctcagatctcacagctaacacttgacttggtgacatacaaaaagatccttatccagtgctctttcaggttcactgccagtcacatcaatctaattataattagatcttaaatgcttattttaatctgatcccataaatgtgttcttggttgggagaatagatttcagttttatttaactcacttatatatcacttagtgctatttgaagatgcagtcttaaatattgtgattacataacgtctcttccagttttataattttgtttctataaaaccagtctggattagcatctgataccagaaagtgacacttttcctcctacaagtaaatagttgtaccatggctgtttactcttacccatgtattaaagtagcttctgtaaacagctctttgcagtttgtactatttctttgccctagggatattgagtcactggacagctcactaaatccaatctcattttagttttagttgtattgattgtgaggaaggaggggtgagcaggaaaagtcctttggaaataataatttgtgtgtttttatcaaaattttgcagaaaatgtttaatctcaaggtgatctttgaagtgaaaggaataatggatgatactctttgcttcaaaataatttatactacaaaaaataaattatttatagtgttaatccatttgcccataacaaacctaatttcttaataacacttgttaatagaggccatttaactgatgctagctattgcctacttgtgctttatatatgtcagactctgggatctgcagtttctcttgggacaaatcttagatattatctcaaaacttggattttaaaagtgttctgtcctaacagaaccaccatgccatttgctcctttctgttgtggaagatggatactttaagataatacctgattctcattttcctgttaggggcctaccaatatgtttttttttttttccctcattaactaaaatcattccaaagttctatgtacagagatactgagactagggtaaaatattctacatattttgtcatgagaagctctttttagtttgaagaaataagtgctttgttaatatgagattccttccatggcagtcatttttagctattaaactaaataggcaaacaattaatttaatcatatcttttgaattgtcccagagtcaccacatactatggacatgtcaattgtattagaagatgaaaagccagtgagtgttaatgaagtaccagactaccatgaggatattcacacataccttagggaaatggaggtaaaggttctctgaatccagtttgtataatgtatttgttaaatgtggctaaatgaaattgagaggataatgtttaaatttttaaactaatgaattattctaatgctacagttaagtttatagcatgtagcctctcgtaattaatggtaaaataatctaattgcagtttttacactagaataattttaacactataaataattttctcaataggttaaatgtaaacctaaagtgggttacatgaagaaacagccagacatcactaacagtatgagagctatcctcgtggactggttagttgaagtaggagaagaatataaactacagaatgagaccctgcatttggctgtgaactacattgataggttcctgtcttccatgtcagtgctgagaggaaaacttcagcttgtgggcactgctgctatgctgttagcctcgtaagtctaccttggtttgtttaaaagtgatcacgaccttttgtctagggaagaaattgatttttttaatggtgaccttttaacatacaccaggcagagtcagtgactactttagggatggcaatgtgctggggcttacggcagtggaggaggatgaaactgttctaatctagaacactaattttcccccaactggattccttgaacatgatatagtacactaggttacaaattttaaaacattttccttccaatattactttctggcatataagcagtgtctcttttattaagaagtaaaggctgggtgcggtggctcgcgcctgtaatcccagcactttgggaggccgaggcgggcggatcacttgaggtcaggagtttgagaccagcctggccatcatggcgaaaccctgtctctactaaaaatacaaaaattagctgggcatggtgatgcatgcctgtaatctcagctactagggaggctgaggcaagagaatcgcttgaacccaggaggtggaagttgcagcgagctaagattgcaccactgcactctggcctgggcgacagagcaagactcttgtctcaaaaaaaaaaaaaaaaaagaaagaaaaactaaatttaaaaatgaaaacatgaaacatgttttcctaagacttgtatttcctaaattttcagctacttggtgaactctggcattgttcccatctcgagaagtctcatgcctttcatttacttcctttgactgaactggggaaaatatctcaaaagtcctttattgatttgggccttttaattagcaattagctatccagtctctactagaaatgatgatcaagtgtctggaaatgcagttggtgtggattttggattcattccatattctgctaatgggatttcagaactgggataaggaagcttgcttctcttttaggactgattacttaaaacttttttcattgtagaaagtttgaagaaatataccccccagaagtagcagagtttgtgtacattacagatgatacctacaccaagaaacaagttctgagaatggagcatctagttttgaaagtccttacttttgacttagctgctccaacagtaaatcagtttcttacccaatactttctgcatcagcagcctgcaaactgcaaagttgaaagtttagcaatggtgagttaactttcattttgttgaatggtgattctttggtaataattaggggtaagccctaattcctttgtaaaggaacctagttcctttgtacagcagtggtgaagagatttagtattcagagggagattaatgctgcagtatggaagaaagcctactgctggcaaaagataatctatatcaggaaagcactagaagcagaggtctaaggatgacatcttggggatgggtagtcagaagagttgttttttaaaagttaataaaggagggaaaatacaggatgaggatggaacaaaaccactaaaatgattggtatgtttaaagatgaggctgtgagatattttttctagagttgctacagagccgttatcaaaggcaggaaaaaattaggttagaaggcagaggtttgacatttgaattctaaacgctcttgtgatcataaagtattttttattccagtttttgggagaattaagtttgatagatgctgacccatacctcaagtatttgccatcagttattgctggagctgcctttcatttagcactctacacagtcacgggacaaagctgggtatgtattacggtcttcacacacctatcttgtgactgaaatgcctgtgccagattaaataataattgtcctacaaaactgagggttgcctagatgttcttacttggaaaaacttcaaatatatatagttgacctttgaaaaacacaggtttgaactgtgtgagtccacttacacatggatttttttccaatcaaatgtggactgaaactacagtattcaggggattcacaacccatatatatggaagggtgactgcaggacttgaatatgtacagatttgggtatatttgggaagggtcctggaaccaatccctcatgtacactgagggatgattatatactgtttaaggcatgttacctgttgaacagtgtttgttaggtagtaagcttagttgtaacttggattgaaaggtgagcttttttaaaagcatctgacctgttgctggcagggaaagtagtagaaaatggatcgagggatggaataatggcctgagaaaactagtagttggaaaagttaaagattagtactggaatttaacataagcttaatgccaactatttactgtgtttggtgtgttactaaaagcaaaactcaggggttctctattcccttctctgtagcctgaatcattaatacgaaagactggatataccctggaaagtcttaagccttgtctcatggaccttcaccagacctacctcaaagcaccacagcatgcacaacagtcaataagagaaaagtacaaaaattcaaagtaagaattaacttggatattgaagcttacttttctagattatggttcagagatctttgacattttaaccttattcatgaatctgccatagcctccttgagaagctgttctctaaattggttatgtgtttgaagaaggttgtagttcatgctttctgccctgggtctgggggagaagagagaaggaagggggcatgcatgtgtgtttcagggaccagacagtgtttctaaaaccatcaagtcggtcagacagaaatagcattttttagttcccaatacatgagtacaaacattattccatgatctcctttacccagtgagtgtttactaaaaatgctttttttttccctacttacaggtatcatggtgtttctctcctcaacccaccagagacactaaatctgtaacaatgaaagactgcctttgttttctaagatgtaaatcactcaaagtatatggtgtacagtttttaacttaggttttaattttacaatcatttctgaatacagaagttgtggccaagtacaaattatggtatctattactttttaaatggttttaatttgtatatcttttgtatatgtatctgtcttagatatttggctaattttaagtggttttgttaaagtattaatgatgccagctgtcaggataataaattgatttggaaaactttgcaagtcaaatttaacttcttcaggattttgcttagtaaagaagtttacttggtttactatataatgggaagtgaaaagccttcctctaaaattaaagtaggtttaggaaaacagaccctcaaattctgacattcattttcctaagcaactggatcaatttgctgacttgggcataatctaatctaagcatatctgaatacagtattcagagatagatacagtagagattccccagactttttcgctctttgtaaaacctgtttgtttaggttttgcgaggtaaactcaacagangttgggagtggaagagggtgggaagcttatatgcaaattaacagacgagaaatgctccagaaggtttattattttaaagcacattaaaaacaaaaaactatttttaaaatcctgctagattttataatggatttgtgaataaaaaatacccagggttctcagaatggaataaatatcccttttaatagttatatatacagatatacaactgttagctttaattggcagctctcttcttttttcttcttttcactggctttttacttggtgctttttcttgttttgcactggtggtctgtgttctgtgaataaagcaaagtaagaatttactaagagtatgttaagttttggattactgaaataagaggcatttcttagttttccagtaggatctaaaatgtgtcagctatgagtaagactggcatccaagaagtttatattatagatttaggtcctaatttttataaatcacaaggtaaaaaaatcacagaacagatggatctctaatgaaaaagggatgtctttttgtttatagtcatgtggcaagatgagagtaaaaccagagagcaaacctctataagtgttgagtatatgtatacatttgaaataaaccagaaatttgttaccttattttctttggattcttgtctggttccaaaatgatcatttcttcttcttcactatctgagagtattatgggagcatctttgtttttttattaatttaaaaaaaaaaaaaaagttaagcaatctcttacaaaatttatttctacatgaatttatttctatcagacgttctaaactcttatttctggggctgggcgtggtggctcacacttttaatacccacattttggtaggctgaggcaggtggattacctgaggtcaggaactcgagtccagtctggccaacatggtgaaaccccagctctattaaaaataatagaaaaattagccaggcgtggtggcatgtgcttgtaggcccagctactcgaggctgaggcatgagaatcgcttgaacccatggaggtggaggttgcagtgccactgcactccagtctgggtgacagagcaagactccatcccaaaaaataaaaataaaactctaggtggaggcttaatcttttctttaaatcagcttcttagagcactctagaactcatctgtaacatttgtttctttaaactcttatttcctacaggtgcttgaatggtgtgacaatttggtacatgtcataatagaaaagctagggggaaatgtatatagcatcttttgtagagacaactgaattgtttgtgctactctattcctccagaaatagttccagtttacattccaagaaataaaagaacccatttcccatatacctttggcattgctggtgtttttaatactgcccaaaatacagtaacaaaaaatgccatgtcatttttctttggattttatttgtattactgtcagggctgaccatgaaaaatattactggccattgtatactttgagaactgctccatgtattttgcccatttttctcctgcttattagttaatgatatacataaaatgtgaattaacccatatcaattatttgtatttttagttttcaattagtttctccctttgttcacatgctttaggaaggctgtacctgctccatttttccaatgcttaggtccaccttcattatattcagttgaaaatattattcactgttagaagaatacactaaacaaacatataagaggtatatgcaagtgcaaggatattaacagtgagaaaatggaaacaacttacatcttcaacaataagagaattgttaaaccaactagttatattcaatgctatacaagtatatgcagcattagcttacatcactgcacagagagtaaataaatacctggaacaagttctggaagaataataccaaatagaagtaaccactgggaaatttgagtaagggtcccaatcaatgggaaattttttccttacctatttacttaagtaaaaaaacaaaaagcccaggctccagtaatgttcataagcaataatttctctctttgaaaacagaagtatttgcattacattcctattaaacacatcaccttcaattttccctgccagcctagctcccagttccttgtaggatttctgttcttaccacgtaagaaaataagtcattctattatatagaccagcaagaatttgctttttttaaaaagtagaaataaccatacataacaacttcagttctatggctttcagaatgcaagaaacgtctaggactaccagtattctagttacttatagaatttttttatgttctaatactgcgatgtctagcatggtagccactagccacatgtggctgcttaattttgtattaagtaaaatttaaaattcagttctcagtaacacaagccacatttcaagtgttcactagccatgtggggctagtggctgctataccagtgtagatacttaatgtttctatcatcatagaaagttttatttaggcagtattatatgttatgatatgggatgggctttttgtttcagtctagaaactacaaaaaaaaagacagcagggaggaatcagatcttcaagaaactcattcccttaaaacccacccacatacatacacacacacaaaatttttttaattaaaaatatcactatcatttatgccagtgttccactactctacaaagatatgcatattcttttagaaagtagcattagtattgcagctagccacaataatttagttgaaatttaaatcacaatatttagcccctctaaaaatgcaatacttacatccctatatataactacatatctatattctctctatatagtatcctgtatgttatttatccactatacatctctatatagctaatatgctatatattactatatacagtgataatataaatatacacacattttatgcattatatatataactatacggtaatactatatgtatgtaatatatagtaataagtgtgccataaagtgtcacctaccttggcttccaatatcagagacttctactccagtgtccatttttataccatcaagaatgatagcttgatcaccaccgccttcatcatcttccttctcagagtcttcaagatcaccccaggagttttctactccctctccaatttgggcagttccaggagtccatagcacaggtgtagaaacactt

SEQ ID NO: 809 - DNA, 2750 bp, Homo sapiens
ttttcagatcccaattttgttcgtacttttcttaccacatatcgttcattttgtaaaccacaggaattgctgagcttactgattgaacggtaagaaaaatatgtatttcagttatattgacattttgtgaaaaattaactgtattttgtaaagtgcctagtacctaataaatactcaagttaattattgaacatattttatttggcattaaattggcagtattactattctcttcaaatggagtactccctaaaatctgtttataaacacagatcttttcagctcttagaaatatttcaagtggtaatcagaaagactaatttagaggatgaaagcactatattttaatgaatattgttctgtgtaataaaatgatattttcttaaaagagacttttctacttaccactatttttttttttggaccgtagactactttgccaaatactttccacttttaaaacaaacttgttatgaaaactttcaaaacacatacaagagcagatacaagaatataataaacccatttattcatcaaccaccttcagtaattatcaactcattgtttcatctgtttccctacaaatttaaacaccccaccccatgattattttgaagtagatcctagacaacataattcatctataaatatttttctatgtatctctagaaaatacgggatcatttttaataatcagatatcattattaaacctaaaaaatcagcaattcctttattatgattaacttttaaaaattagtgttgggttgaatttgttttacctagtattatagtggcattttaaatgttttatagtttaaaatgtagaatctggactccagaatgatttttagttttacgttttaaaacttactaaaacttattattataccaaagcttattaactgtattatcaagatataattctagatctctatcactatgttgttttatcaaactaaatttaccagactgagtcagtgtaatgtgctatgaggatctacttagttgtttccatgtccagaataaggaaagcacacgttagacttatagtttagctgtatttcctatgtttgagcaaggttttttatctttatcttatccacttaggtaaattatttaaatattgttaaatattcggttttggccctctctttgaatttgtactcatttaaataaatttattagcctactttcattttaataatataaatattaaagacattgttagataagcaatttctgtcatgttctttaaattccttatgaattctttccttggctcttttccctggaccttttctgtattatcagtgctaaaagacaaaactttagtttttataaaagtaagaatacaaaacgtcagttttgtatagccaaaggacagttttttgtagtatatcatacctcaagggaagtttaacagtaatccacttttcgtggaagtggtaggaaagaaggttgcttgctgttttcctccttgtattttcattatgtatgaacggatttttctccttttgcttttcttcttaggtttgaaattccagagccagaacctactgacgcagacaaattggcaatagagaaaggcgagcagccaatcagtgcagaccttaaaagatttcgcaaggaatatgtccaaccagtacaacttaggtttggcttgaatattttttatatatatatatatacacatatatatacacacacacacacattttatgtgtcagttttcaatatatagttaacacaaaagctctcagcttttaattcaaatatagggaatatttttaacttcacagcagttaagttaaactaaaagagttctttctcagtgaagctattcttaaataccctgaagaaattcaaatatttaaatatcctatgtttgcatcacatatctctggcatgtgatatgttatgcttacgtatcaggatacctattttttattgtaagtaaaaattataaaatttcatgtgagctttcctgctgtcaaccttttttcacacttttttccttcatttccctttgcgatcatacagtaatcctggctttttttacaatttataatatttgtggaagttctagcccttttcccacttatctctcacaaaatatatagacatttgttagtttaattgcaataatttctaaaaatgtgtttgattgtagaagcttccagttaataaatactactgtgtgccggggattaccctaaatgctttatcttttttatctcattcttacaacatgattactattcctactttatatataaggaaattgaaacctagcaaggtgaagtaatttgagctaagttatgtaaagggagtggcaggacaagattcagactcatgtctgactttctttgcgtgtgtgtgtgtgtgtgtgtgtgtacgtaccactaagcattgaaaattggaagcgccttctcttagccctctttactgtccaagtaaccaaagtattatcttcctccttccattggaaaccaagttatcttattaattatatgtaatttaaattttttttctctctaaatttcaagtttccttgattactgttgaccaataaattgtaattttggaactgagtatattagttatttatttcccaggataattgccacaaacaaatgcagttttagaagaatgatagtgctcccagctatatgtctttcactaaaacttttaacgtcattctttgtataagaagatgagattatttatgtatcagcaataaataagtaa

SEQ ID NO: 810 - DNA, 996 bp, Homo sapiens
aacatagactgtcatgatattgtggctttcttggggactttactgggggaaaaagacacatgaaacagttatatattgttctacttggagtgcttaagtgacttagaaaaatacatccctatacaatttcaggaatagcaaagattaggccagagtaattagggaaggcatcttggagaaggtaaaatctgagactgcccctaaaggatgtataggctttagataggtagaaaggtgactgtaggtattcagggtcatgagaaatagtatgaacaaagacaagaaggcagaaatgagaatggtgtgctgaggacacagataaggacattgacctgagaggaatgtaggcattgtattgcaagtagtagatgagattacctgtatggaattggatggagtggaaaactgtgaaatccaagccaagttattaaacctgtttatataaatattgaaagatttctagtaaaatgggtggtagtaatttttctaacattttattatgaaaaattttaacatacagcaaaactgagaattttacaatgaacacccataaacccaccacctagatatgtattcatctattcatatctattcatttatgtgttcatttatcattcatctatcagttcatttttttgtatgaattttgaagtacactccttaaatacttcaacttgtatgtcattaacagttcagtgtttgtttttcttttgttctaaaatgtgcatataattaaatacatttttttcttgctgccactgaagacagaagatacacacatcttaagtgtacttttgttgagttttaacaaatacatgtatctccataatccaaacgcctttcaagatatcaaatgttactacaccccagaaagttcccttatgttccttctcatcagtttttgttcccactgcccaaaggcagtgttccaatttctccctccatagattagttttacctgttttagagtcttaataaatgcattcttaaaaactc

SEQ ID NO: 811 - DNA, 102 bp, Homo sapiens
agtagagatggggtttcaccgtgttagccaggatggtttcgatctcctgacctcgtgatccgcccacctcggcctcccaaagtgctgagattataggcgtga

SEQ ID NO: 812 - DNA, 31718 bp, Homo sapiens
agaagggaggtagtcgccctccgtcgtggcctggcgtggattccgagcgttggtgtctggcggtttccgaccgttggtgtctggcacgcgccaccccgatgtaccaggtaaagccctatcacggggtcggcgcccctctccgtgtggagcccacctgcatgtactggctccccaacatgcacggcaggagcggcggcccagcactcggcactggccacttgcaggtaggagcgcggggcccccccgcccactgcgcacgcgcggcggcccgttgctggcccaggtgcccctaggccggatagagtgcgtcccaaccgattcgcggccccaccccggcatctgtgccggccggccagggggtcacccagatttttatgttttaaaagatttattcaggccgggcgccgtggctcacgcctgtaatcccggcactttgggaggccgaggcgggcggatcacctgagatcaagagttcgagaccagtctggccaacatggtgaaacctcgtctctactaaaaatgcaaaaattagccgggcatgtgtcgggcgcctgtaatcccagctactcgggaggctgaggcaggagaatggtttgaaccctggaggcggagcttgcagtgagctgagatcgagccattgcactcgagcctgggcagcaagagtgaaactccgtctcaaaaaaaaaattattatatatatatatatttttatatatgttaaatatacctttattatgcgtattatacatattgtatattatgtgtaatatataacatgatatattataaaatatatattatatatatatatatctttcctggtcgagcgcggtggttcacgcctggaatctcagcgctttgggagaccgaagcgggaggattgcttgagcccggagagtttgagaccaccctgagcaacatagcaagacccttgtctctatgtttttttttttttttgagttggagtcttgctctgtcgcccaggctggaatgcagtggcctgatctcggctcactgcaagctccacctcccgggttcacgccattctcctgcctcagcctccccagtagatgggactacaggcgcccgccaccatgcctggctaacttttttttgtatttttagtagagacatggtttcaccgtgttagccaggatggtctcgatctcctgacctcgtgattcgcctgcctcggcctcccaaattgctgggattacaggcgtgagccaccacgcccagctgccttgtctctattttttaaatgttttaattaaaataaaaatctatccatattttttctttttttttgcgtatggctgcttaaacattttagttcagaattctatcctctgaaaagtgagtagcacataaatgctcattttgaggaattacaaagcgaaccccagggtcaccacctcccaggttgacacacattgtgaccgctccattctttccacttaaaccttccccaccaacatcccagggcccgatttttatggtaattatgtcctgcttgtctctattattttgtcagctaagtatccctaaacaatatggtctggttttttgtttgtttttgtttgtttgtttttttcagacggagtttcactctgtcacccaggctggagtgcagtggcatgatctcggctcactgccaccttggcctcctgggttcaaggaattctcaggcctcagcctcatgagtagctgagattacaggcgctgtccactgcacctggctaatttttgtatttttagtagagacggggttttgccatgttgaccaggctggtcttgaactcctgacctcaggcgatccgcccgccttgaactcccaaagtgctgggattacaggtgtgagccaccgtgcccggcacctaaacaacatagttttgatataggtaagcatacagcatatattttgatgtatttcaggtaatttagtctaagaacaggaaaggacagaaaatgaacacaatttgtagttctttgttgttaacaaactaagaatactttgcttaaataagtagcaatgagaatgtaactcagtaattcatacaaatagacaagaagacaagaaaatgatttgaggacagcttcaatcgcggtgtgaagaagaaagcaacaaaacgaccactgaaaacaatgccggtgagtcagccagttttgtttttgaatcttgtcagggaagcagcccagctattcgggaggctgagacaggagaatggcacgaaccccgggggcagagctggcagtgagccgagatcacgccactgcacgccagcctgggcgacagagcgagactcagtctcaaaaaaaagagaaaacctaagaggttcaggtgatatggttcaaaaaaggacaagatttacaaagtattaagggacggaaataggaagaagagaaatttcgaagagaaaagaaaagaaaaggatgtttggttatagagatacaggaaggggactcaaggaatttttttttaaagggaaaaaagttaataaacttcataatataaaaatcaattattttaggactgagtctaactcagactctgctgtggaattggcagcgtaagcctacttgtgtgataatgatgaaaccaagtgttaatgtcactgttacctttttttcatatttctgatctttttatgtgtatcaggtggcaaaacatccaaagaaagggtcccaagtggtacatcgtcatagctggaaacagtcagagccaccagccaatgatcttttcaatgctgcgaaagctgccaaaagtgacatgcaggtaaagcagtgtcttacctctgttgataccatctcactttttgtaaggtggtaaggacaagtgtctacaaacttgatttgatgtgaacattttagtgagtgtaacatatcaagaaagataagattatggggtgaatccttggagtgatagaagggtaaccttgaataagagagcatgttcttttttttttttttttgagacagagtctctttctgttgcccaggctggagtgcagtggcacagtctcagctcactgcagcctctgcctcctgggttcaagcgattcttatgcctcagcctcccaagtagctgggcttacaggcatgtgccaccatgcctagctaatttctgtatttttagtagagatggggtttcgccatgtcggccaggctggtctccaactcctgacctcaggtgatccgcctgcctcggcctcccaaagtgctgggattacaggtgtgagccaccgcacccggcttcgagagagcgtttcttttcttaaagcgtgttcttttcttaaaggtatcacaggagtgattatgcctttgttgattgatggagcagatggggagaggcattgcatgacatgggaaggaagcttagatgtgggtggcaccttgttcacccatgttattttttagctccatcttgacaattatacttaattatttttccctctctctgtttctttttttataattttattgaagttctaatatctgaaagtgtacaaagcgtatatgtagtttaaaaaataaaaatgagatatcacccagatctctagccccagctcaagaaatgaaacattaatagtgctgtagagatcctttgtgtaccttctttctaccctacctcacagtccccttattacccataggtaaacactagggtgaattttgtgttaatctttgtcatttcattatagtgttaccactatgaatgtgttctttaattatgtaaatgaatccattattcaggcttctgtgatttaattatttcagttaacattgtttgagatttatccacattaatgtgtaattttatagtttctgggaaaatatttaaaattttcaaacatacagaattttgctagttatattttcgttatttgatttctaactttattgtgttgtagtcagggaatgtggtgtttgaaatttatgtaggggctgggcgcagtggctcacagctgtgatcccagcacttggggaggctgaggcaggcagatcacttgaggccaggagttcgagaccagcctggccaacatggcgaaaccccatctctactaaaaatacaaaaattagctgcatgtggtggcatttgtctgtaatcccagccacttgggaggctgaggcatgagaattgcttgaacccaggaggtggaggttgcagtgagctgagattgtgccatggcactccagcctgggtaacagagtgatactctgtctcaaaaaaaaaaaaaaaaaaagacatttatggagacttagccttatggcctagtattgagttggtacattcgttttatcttttctgtttctttttccccctttgcttactttcctctggatttcttatcttctacaaggacctgagcacattttaattccagttgtcttttccaccttacatgcagttgtacagtgtgttagttttttatttgaaacggagtcttgctctgtcaccaggctggagtgcagtgacgcgatcttggctcactgcacctccgcctcccgggttcaggcgattctcctgcctcagcctgccaagtagctgggactacaggcacccgccaccatgcttggctaatttttggccaccatgcccagcctgaatgaactttcaaaattggtttttaaaagaggtatggaggccgggtgcagtggctcacacctgtaactccagcactttgggaggccaagacgggcagatcacttgaggtcaggagttcgagaccagcctggccaacatggcgaaaccccatctctactaaaaatacgaaaaggtagctgggcgtggtggtgcacctgtgtattcctttcatctttctcattataggatttctgacaggactctgggcccctccccagctccactccctacctcaagaatgtgaccatttggaaaaggcaaagagaaaaggagcaaaatgaagcattcccccaggcttcagccctgggctctgaggggaaagagtggggcattgtttttctaacctaacctttccctctggtgatgttggggtagagaagccgagagaccctgtcctccctaatgcactgtggcccagtccccttgcctttttcctgttctgtttggagtggagaagggcagcacctctgtgtttaatggaagtagcccatagtctcctggatttttggaacatctttttcagcctattttgtgtcctaatgattcactcaataaacatgtttgaatccacacgttcccaaggtgtggcttgagatcgttaaactgatggaggtcaggttcttggtccgccttgtcccatggcccagtgtataggtgtccccacaccccgcaggtgctttgtctacaggctctccaggaagtattgcttagtaactgagaggcggggtgaggcagtagagatggggagagtttgactgcctgtgagtagtttatctagtggcctcagcctctgcagtagtaaaagttgtgctgacaggtggcagagtggagcaggaccttgtgaaactacctgtctcacccacgtgagccaggccagaccctgtgtcctggcagccttcatccatgggttctttccaaaggaaattttatcctctcatccgaaagatacctgtcataatttggaatttgatcaaatcacagtatctgagagttaaaaggaaactaaggagttactctaaatgtccaaccctaaaatccaagtgacaatgtcaccttcactcttgccttctccagctagttcttcaccaaattctgtcaagacttggtgaagaaaattctctggcctatgtcctccacacattgtcaccatcgtctctcacctagactgccacagtgcagcctcagggccagcctcttgaaactcagacagacttgtttgctcttgttttgccttgtggagcagcacagcacctctcttctctcttgtccctctgacaagcagtatttgaagacagatgttgtcattttgtactttcactgttttcttttgtggtttaaggaatgcttcagcctttctctttagatataatttctagttcttcccatcatgggcacctgctttagtgacaggttctcactgtggtctcctaggccagacacagccatccagctagtgatctgtgcagaaggagccgtgacttcctgcgatcaggtcactcagccaagaccgcctcgccccttccattctccctcccctcccccacctgcccctcccagatgaaagctagaagaaattgagttgtgagtctccttttggaaaggtagccctgggggagtccgagctggggtgtgggggaaggctaactcattcggcgatctttagcctgtattcaggtagaatagttctggggaaaggagcctgttttgtgggatgagggaacagagtgggagaactgaggagaagatgcggaggtctttaagaatccaggaggggaacgattcctgagttatttaaataccaaccaagctaagggtgcttcacaagaggataagagcagcttgggggctttgcatcaatatggacacctgtgtacagccaggcagcccagtgcactgggttgagtcacagccttagaatctgggagcttgacaccatgctctctaaagcctttgacactgtttattgagaggctgggtctaggttgtctcctcttgaatatgggcttcgtgatgcttgactaatagaagatggtggaaatgatgccatgctagttagtgggcccagattttaaggaaactggcagtttccgtttcctgtctcttcctgtacctgggttcacactgggaacccggtcaccattctgtgagcaaggccagcagtcaaaggaaaaggccgtgtgtaggtgttcttgccagcagtcctcaccgaggtcccagccaacatccatgttggctgccagactcagtcaagacgggagtcagatgattccaacctcccctgtttttcagttttcccagctgaggtccagacatcagggagcagagacagcccatcttttctgtgcactttgcaaattcctgactgtggagtccatgagcataataagatggtggttgacagcactcagtctggaggggtttgttacgtagccaaagcaactggaactgggccttagagtcataagactcccaatgttaggacatttatatcaaggtttttttaaaaattgtaagttatataaacatatactaattcttctatattatacacattaaaaatgtaacacatgagttgaaataagtgttttaaaatatttcattggttagcactgcaaaatacctttttgctcttttttttttttttttttttttttttttttgagacggagtctcggtctgtcacccaggctggaattgcagtggcacgatctcagctcactgcaagctccacctcctgggttcacgccattctcctgccttagcctccagagtagctgggactacgggcgcccgccaccatgcccagctaccttttgtatttttagtagagacggggtttcactgtgttagtcaggatggtctttaactcctgacctcatgatccgcccgcctcggcctcccaaagtggttggattataggcgtgagccaccgcgcccggccaccctttactttcaaaaaagggtttagtgagaacaaagtgagaaacatttttttaaatcatggttcaacattttctgaagttcagttgaaagttcagtttagtgctgggtgcggtggctcaggcctgtaatcccagcactttgggaggccagggtgggcagatcaggaggtcaagagattgagaccatcctggccaacatggtgaaaccctgtctctactaaaaatacaacaaaattggtggcatgcgcctgtagtcccagctactcaggaggctcagacaggagaatcgcttgaacccgggagacggaggttgcagtgaaccgagattgcaccactgcactccagcctggcaactggacgagactctgtttcaaaaaaaaaaaaaaaaagttcaatttattctgatacttaattttaatgaccttcataactgccaggagtacctctcaaaaacaggcaaatccaagtggattaggtgcctctttgcagttaccactttttaaatagatccaaacctgctgaaaatcttcatctagaagacttgtgaacaggtcagaggatgatttcccggcgcagacaacagtgctctcatgaggacaggcattgtctgggagcacaaaacctgaagtgtgtgagctgcagtgtgtggtgatgggctgggggtttgcctctcttccctcaggatactgatcattttccaggggaatcatgacttatcatgtttttatctacacttgatcttggccaaaaggccaagaagcgatactgtctttttgtcttaaaaggttagaatgtttctttatttctactgcacaacatctgtggatacttttttgtgcacgccctcaccctgacaggctcagctgtgaagggttcatgccagcaagccccctgctggccgtccaggacagcccagggctctggcttctcagcagcacctcccactggccaggcccaggccaggctggacaagctgaggccagcttaggtagcaggcatggaggcctttgcccagcctggtaagtgatgcagagcagtgcttttcaggggctggcactgtagggtccagccctactgggtctgtgggtttttctcctcgtgtgcggagatgagagatggtagaaatgaagacacaagacaaagagatagaagaaaagacagctgggccagggggaccactaccacctagacgcggagaccagtagtggccctgaatgcctgacagcgctgctatttattgtatacaaggcaaagggggcagggtaaggagtgtgagtcatctccattgatagataaggtcacatgagtcacgtgtccaccagacagggggcctttcccttttaggtagctgaggcggagagagagaggacagtgtacgtcattatttcttctatgctcttctcagaaagatcaaagactttaatactttcactaattctgctactgccatctagaaggtggagccaggtgtacagagcggaacatgaaagtgaaacaggagggtgactgctgaagcacagcatcacagggagacggttaggcctccggatggctgtgggcgggcctgactgatgtcaggccttccacaagaggtggtggagcagcgtcttctctaactcccccagggaaagggagtctccctttcccggtctgctaagtaacagttatcttcccaggcactggcaccactgctagaccaaggtctgctaagtaacgggtgccttcccaggcactggcattaccactagaccagggagccctctagtggccctgtccgggcgtgacagagggttcacactcctgccttctggtcacttctcaccatgtcccttcagctcctatctctgtatggcctggtttttcctaggttataattgtagaacaaagattattataatattggaataaagagtaatgctataaactaatgattagtaatattaatatataatcatatctataatctatttctagtatcactattcttattctatgtattttctttattatactggaacagcttgtgccctcggtctcttgccttggcagctgggtggcttgcctcccacatggcactgctgggcattgtctgttaatattgaataattgttttaagattattttcaatgattttcaataaggctttaccttttttaacttgcagtgtggccatgaggtctgccggaagtgacttgttggtgttatctcctgagttaaaatgtgaagggatttttttttttcagattactgagagtcttcagttactaggtaagtcgccccatccttattactccaggtgacactgactggggtttatgggatgaaagaggagtgtgtgcttggatgatggggtgtgatagtgaaggggtgaaaggtttcttctcacacatagacatcgtgaggtcttccttgagctctttagagccttccctcgggataggatgaaatactgagatcctagaaaggattcacaagacgagtcactcatcagtgcagattcaccgattcacccctagatgtgtgtgggatttggatggcagagagaaacaggcactgaagatttttggtcaggacagggcagagaaataaggagaagagttgaaaattcaccaaaggatagataaacccggggcgtttagagaaaacctgtagtgtgcaaaggagcccagaatcctggggaaacttggagggaaatatacttaatttgattcactaagttaggcccagtgaagggattgggtggcataggtagaagccgaaaaataaagcatcttgtattgctggaatagcctctgtttctgaggtcacatccaaacttagcgaggcagcttaacctggtgagagacacgggttcaactcctggcttctgcactgccagggcaaaggactgccgtttgctgacacagtcttgtaattcaatttaattttttaaccaaggtgtgggagaaggcagctccgcataatgctgaatattatgggttctgaagcgaaaatttttgtcagggtttaaattttggcttcattgtgtaagtagcccttccaccccgggcaagttatttcccacataaagcaattgctaagtatggagctgatgtacgtgcatcactgagaatgggtttagcacatagtatccactgaagacgctatcttgcattagctgtattactgtgataaaggataagctataattaaagttacagaggaacaaaagcagcccttttcacaacatttaaaacatgcatgtaaaaataaatgcagcagtgacaagtcttatgctacaaactcagaagagcagaaacaactttatttttcctctatgatttcaagctctttttctgcccagctgctgagaaaatttaactcctgagtcttcttggcttccttccttttccctaaggttgtgtcaagtgccaaagcatttaggggagggaggaggcctctagtcctctgtcaaaaatattttggatttttatagtcatttccctttctctgtggtgagactaggccctccaggaccctgtgttttggccccaggaattgaggccatctgaatcagctgcctgggttcctgtctgcagtgggccccatgggcctacagaagaacagaggctgctcagggctgggctgtttgctgcccagaaccaaggctaggatgaggagctcagactcttccagtggaagcagtgctaggacggaagacagccgcccctgaagaggggacattgacatacagttgatctgcctgggaaggtgtaatagagatgaacttgtgtcatcgcatctttcacacaagccacaaagaaagctaatcctgattcctggtgagaagaaaccaaactcgaggaatgttttatatcacaggacggtcacagcctgtactggggcacgagccagggctgagtagagtgctgcccctgcactcactgacttgatcctctcatttactctgtggagcagtccctgttgggatcctgctgctttgggaaattgctctgttaagcttgcagagctatgaaattgtggccctatttcaaacccatgagggcctgattctacagactgaccactgggctcttttacttcagcaggacttgggctggggctgcagggatttcaccaaggaatgtcaggcaggaggtggccattgtgaaacctgtcccatcttgcctgtacctcctggctgaaagtgggatgcaggacttagattgccaagcttaggaattatttgtggctctgctgttcacaattttggagaatgttaaggaatactcaagaagttgtgagagtaagggccctcacatatatcagaacatgaaagcattccagttaggaccttgtgatattgaaactagaataagcaacccagtggatagactgtgaaagagaatccacatatagacctatgtgtaagaatttatgatcaaggtggcattttgaaacagtagggaaggagcccagcagcaaatggtctggggaatcctggccctccacctgagacgttacacggctctttttttgagacggagttttgctcttgtgcccaggctggagtgcaatggtgggatctcggctcaccacaacctccgcccctgggtttaagcggttctcctgcctcagcctcccaagtaggtggcattacaggcatgcgccaccacacccagctaattttgtatatttagtagagatgggatttctccatgttggtcaggttggtctcgaactcctgacctcaagtgatccacctgcctcggcctcccaaagtgctgggattacaggcatgagccactgcacccagctacacagcctttttttttttctttttttgagacagagtctcgctctgtcacccaggctggagtgcagtggcgcgatctctgctcaccgcaagctccgcctcccgggttcacgccattctcctgcctcagcctcctgagtagctgggactacaggcgcccgccaccacacccagctaatttttttcgtatttttagtagagacagggtttcatcgtgttagccaggacagtctcgatctcctaacctcatgatctgcctgcctcggcctcccaaagtgttgggattacaggcatgagccaccatgcccggcctacacagcctttttaacaccacctccaaagtaaagttcttcatggactaggaagaaactctttatagagttatgcataaaaacaaagccataaaaatattttcataatcttagccttcctaaggaatacacaaacagaaatgataatgttaaagatcaagcctcatgagaattcaaacagggaggggaacagaaggagctggccaaaggagaactttgtgttctatgttgtttgaatcttacacaatgagaatttaggggataatgtgacttaaaaaattgaaaaaaaaaatgaaaatggtgggtagtcaactttgcaccatggcttttaaatccctcaataaattctgggctccccatattggggtgaataaaagacacacttcctccagggctcagcatccacctgtgaaaatgcccccaggactgtcgagaacccagctgggaggccacttggatgattatccaagaagtaagggcgcagtactttggggcagcttcctgaaggtggtgggatttgatctccttcttacaaagtgggatttcagcaggtggtgtagggaagtttaaattttttccctgaaggtttgataatctgagtctatgaaacaaacataaaacattaacaggaaaaaaaaccgacttaaaaatgttactacgtgcacacatgtgcacaagtcatacaaaatatataaaaaaataaatggccagatggttgacacttttatacccatcttgaaattacagaaataacgggaggcctggagcgcagcaagacagattaggggaaggggagaggagagacttggctagcaaaggtcttgttctgcaggtgacatctcacagctggtactctgcggagcctgtggtaggcaagtccttcagacccttaaaggggtccgcctctcagtttgtctttcctagatccagacacggggactgcagagaaaggctgtgtgcatccgctgtctactccactgtctcctctgcagaggcggatttccctgactgaagaccatgttgcaggcccacagctgcctacagaaccgtcccaaaatatggcaaagaaacctattctgaggttaaatattttggtttctttcagtgggaggcaagggtcttccggactagggaggtagatgtgcagcagcctcaggtgctctaggtgctttgtagctacgctggccaggccacctgaggtaggtcccctttgcaccagtctcacaccctgctgggggatggtagtggagacagcagtaaaagcaggtctgaggcaggtgtggagattagtacaggtggcctgggcgaagggcaaagggtgaagagaatgttgggagccatgggtgactggctgcgggcataggcaccatgaaggctactatgggctgcagggtgtggatgaggggacagagtttgccccagagaccaagttggtttgtgtcaaacaccacaggatttttattttgtatttttttttaatttttaatttttaaatttttttttgagatagggtctcacttttacccatgctggagtgtagtggcgtgatcttgggtcactgcagcctccacctcccaggctcaagtgatccttccgcctcaacctcccgagtaactgggactacaggcgaaagccaccacacccggctaatgtttattttttgtaaaggcagggtctcactatgttgcccaggctggtctcaaactcctgggctcaagtgatccacccacctcagcctccggaagtactgggattatagtcatgagccaccacatccagccagcaccacaggattaagcagacatgatgagtctttgacacaggggcaaaccaggacccagagaggtgacttgggacagggctgtctcttcagtccttaccacaccgtggacgagatcaaccttaagacagcaccctgggctctcactggaccctggattctggctcacagcacacaaagcaaactgatccctggaaagggtcacttgttgctgcctagcagcattctggtaggttggcatcctcaaagtgacataagcagtgaagcaattcagagcaacatttatttatcaagacagggtctcactctgtcacccagactggagtgcagtggtgtaatcacagttcactgcaacttctgcctcctgggcttaagcgatccttcaacctcagcctcccaaatagttgaaactacaggtgcccaccaccactcctggctaattctttctttcttgcttgcttgcttgcttgcttgcttgcttgcttgcttgcttgcttgctttctttctttctttctttctttctttctttctttctttctctttctttttctttctttctttcttcttctttctttctctctctttttctctgtctctctctctctccctccctccctctctctctctttttctttctttctttcttttttttttttttttgtagcgatagggtctcaccatgttgcccaggctggtcttgaactcctggactcatcctaaagtgctggcctctcattccctgtctgtgcacacctcacggcaagggccagcctgtttcctcccggtcacctccaaatcttgctgcttttaattcaactcagaggtatgcacttgaggtaggagggcaggggaagtggggatggcaggacatggatggcccttgaggcattggctctgggtgtcatgggctgtgagagtcaagaagggcagtggcctgcctgacttgggttcgaaagggtcactctggccactgcggtgagaactgaaactagccaggccaattctccattgttcctgctcttccaggtaggagaatattagattaggtctggagtcagaaggtagcaggggctgggggttgcagggggatgttgagaagaagtggtcctttggtcagggtgggaagccaacaggatttcctggtgcattggaggtgaaagggaagaggcgctggtggttgtgctttgggcctgagcagccagaagccgttgccatcacctatgacaagggagacagcgcctggggcagagcccagtatggggtgcattcagggtagatcaggaggtatgagtgggcagtgggcgagccaggctgggggttgtgggggaggcctgggttgcaggtttaagcgtgggacccacgtcagattggtggtgggtcatgcatgctggggtggctctcaggtcctccctgctggcttcccactcccaggggctttctcctcccagattccttagctgggtgaggggcaggacagagccctttcctagggaagcccggcaccccctgctgtccagggaaggggagtccttctagcccctgacagcttctctgcccctcccctggcctccccaggcctagccagggttgagttctcacccacctgtgccgccctgccttgttacctggaagcacagccttggggactgagcaggccctcactgtcactttaagaagggaatcagccactttgtgctcaccacctctggggaaggtgtgagaggagagaaggaagtggctgtttggctgctgacaacatgaagacttcctgcgatgagaacagaggcacaggtgccggccctgcagcccccagaacccggactggagggggccatggggcgccggaccctggccctgccctgggtgctgctgaccctgcgtgtcactgcaggtgagtgccggcaccagagaggggcaggggctgcagggagggtgatgtaggacgacagcccacccaccttgctgctgttccacagggaccccggaggtgtgagtacaagttcggatggaggccaccgagctctcgtccttcaccatccgttgtgggttcctggagtctggctccatctccctggtgactgtgagcagggggggccccgatggtgctggggggaccacgctggctgtgttgcacccggaacttggcatccagcaatgggcccctgctcgccaggcccgctgggaaacccagagcagcatctctctcatcctggaaggctctggggccagcagcccctgcgccaacaccaccttctgctgcaagtttgcgtccttccctgagggctcctgggaggcctgtgggagcctcccgcccagctcagacccaggtggggccggggtgaggggtccaggagggcagggaggggctcgggaactggccatccatctgattcttgcctctgtgcccagggctctctgtcccgccgactcctgcccccattctgcgggcagacctggccgggatcttgggggtctcaggagtccttctctttgactgtggctacctccttcatctgctgtgccgacagaagcaccggtgagacctgggccctgtccacgtccccctgacactgggctggccacatgccgtgcagagctctgaccatccttgctctctcccagccctgcccctaggctccagccatcccacaccagctcctaggcactgagagcacgagcatgggtgaggaggggggctgctttggggatgaggtggcaggggtagggggggccagggctgggcccaagctgtacagactcacttgatcctccttcccccgcgcaggcacccagccaggcctcccaggctgctctccacgtcccttatgccactatcaacaccagctgctgcccagctactttggacacagctcacccccgacagggggccgtcctggtgggcatcactccccacccacaccgcacactggccccagggccctgctgcctgggcctccacatccatccctgcacatggcagctttgtctctgttgagaatggactctacgcttaggctgggcagaggcctccctgcactggtcctggcctcactcttttccctgacccttggggcccagggccatggagggacccttaggagttcaatgagagagaccatgaggccactgggctttccccttcccaggcctcctgggtgccacccccttacgttattcttgggcctctaataagtgtcccacaggtgcctggccaggcccacctgctgcagatgtggtctgtgtgtgtgcatgtgtgggtgtgtgtgggcacaggtgtgagtgtgtgagcaacagtaccccattccagtcgtttcctgctgtgactaagtcagcaacacagttcctctgacatgggccttggctgtgcttctttgggggtgaagagattggggaggaagtctccacccctgggaggcagaagccaggtgagaaccagagtgggttggggcctccttgcagggctgggtttggcccagggagagggcagtgtcccagtcttagagatctgtcctggcttcttggggtggcggggggttgggggagcttcctgagggacacctgtggcttcctagacagaattgggggatcccagcgggatggtccctgctgcaatcccaccatgtcctaggacagcagcaagggttcctggggcttcagcctgagaaaagtccctgtgatttgacctggcgtccctctgccgggctccctgctgtggcctgggctagagtcctgatgccctccttccacagctggcatcaggcagggctggaaagtaggaggacttgcctgaaatctggctggatttcagagccttgctctgtcacccaggctggagtgcattggcacgatcttggcttacttcaacctccacctcccgggttctagtgattctcctgcgtcagcctcccgagtagctgggactacggatgtgcaccatcgtgtccgctaatttttgtattttttttttttttttcagtagagacgggtttcaccatgtttggctgggctggtctcgaactcctgacctcaggtgatccacccaccttggcctcccaaagtgctgagattacagacttgagccacggtgccccgcctgaataggagcttcttaatcaaaatttcagcatggctctgggtcaaaattgaccagctgatttaataagttgatgtaaaaattttacagtcagctacccctgggagggggagtctctccctagtcagtgaggcaccagatgccagagcattggcaatgtacaaggggctcagccctgtggctcatatgtgtaatcccagcacactgagaggatgccttgagcctgggagattgaggccagcctgggtaacagtgacaccacgtctctgcaaaaaagaaaattaggggagaactgtggtgcgtgcctatagtcccacctacaggcagagcgagaccatgtcccccactaaaaagaggccaagaatgcaggaaatatagataatatgggccctgtgatgggtggaggccaaatagatcaatacagaattgaagaagacacagagcacttgtatttcccttcaggcatagcgcgctggctaggactccagtaccgtgaagggaggcagtgagagcagacatctgtgcctcattcctgatctcaaggggaaagcaagaacaaggtgggtgccaaggaggggcaaggggctggggcaggcatagacgtggctggtgaggaaaggaggatagttgttgggggaaggtggggacatacaagcagcagttctcaaaatgggcagggtcctggccccctccctgcctctgctgaacactgcatcccatgcctctcccatggccacctgctgggctaacgggctggatttagactctgcccatgttggaatcatgccctcctccagggccggtgcctcccaaaacccccctctgagagagagccacagccccaggcttagccccaggccctgtcactgctgttgggggagggaggatgaaccatccgggaggcctcacaccattccagagcagaaatcctgacacaaaaggaatctcccatgggggttcagctgggtccagagcccggaaagtgacataaacacgcaccttgcatctaaggagaatgcacgtggcggtaccgggcctgaggcccctggggagtatgtaccctccagagctacccagaggctgttggctaaaagttctatgtggccccctccttgggcagcctggtaagcaggtgaccttctagctgggtcccatgggccacgggcaaggcaggaatggaacgaagagtcagtcctcagtggctgggtgttgtatcccatgcctataatcccagcactttgggaggctgaggtgggcagatcacttgaggccaggagtttgagaccagcctggccaacatggtgaaaccctgtctctactaaaaatataaaaattagctgggtgtggtggcacacacctgtaattcccagctacttggaaggctgaggcaggagaattacttgaacccaggaagcagaggttaccgtgagccaagatcacaccattgcactccagcctgggcaacacagcgagaatccatctcaaaaaaaaaaaacaaaaagtcctcaggcagggtgggccaccctcttgaggccttgcccaaacagccagggggtcccttgtcctcttttcggcccacctttgcaggtgggaccagttcagtccaaagccccggtgcctcagtttccctgtgggttgaacaaggagaatgaggtgtatagggcctggctcagacggaggggtttcctgagcatggggagcctgtttcctcagacctgtgaagggaaggagggtggatcggcctgactggccctgggaagcacagaggagcctactgggaccagggaagagactgacaagagaagggaggcctgtccctgcctgcttctgtctcaagaagattgttatcacttcctctggtgaaatcctgccttcctgtccccacggcccctcagctgatgccaccttactctggagaggatgggcagagcctcctatggagggagccctgtgggtcaccaaagctccagtgaccacccccgggcaaagacctgcagatcccctgttagagacgggcccaggactttgtgcggggtgcccactgttgctctgagccttcacttcctcagggaggcttcctcaggatctcgaacctgcggaaggaggaccagtctgtgtacttctgccaagtccagctggacatacagatcagggaggctgtcgtggcagtccatcaaggggacccacctcaccatcacccagggtgagtccagctgccctggcaccaaggaaccttcctggttcagccataggctcaggtgtgtggagggaatgacctgaggggctgtatgagggaacaacctcctggggctcccctatgcctgagttcctgcaactcagaagttgaggcccagagatccaggtagagggggctccagtcctgggactgccctgcaagtcatgtggcctgggacagggcttctccaagctctgtcccctcctgtgtagggcagggaggtcagaggggaccctgcagatccagtctcatgtctgggggtcaaggggtggcctcgagagggaccagtctctgtgtaggggaccgtcagccccctcaccccttgagcaagactgtggtccctgcaccaagggagcaggcctggggtgggaagaggccagctgggctgtggtggtgcctggggactgcatgggagcccctgccagggagggagagggacagaggacaagctgggggctctggtgcttgggctgggggctgagcgcctgtgacctccactggcttcctccttctcctctctgaggactgaatctggggtgcagcagagcacagactcaggcccgcctttcctctccctgaaagagcctgcgctggccttggacagagaaagggatgagaagtgaggctgagtgcggtggggtctgcagggatccaggtgggaggggcccagccagccaaggtgaggcccagcccctcagcaggaagatgggcactggggcccttgggcagggctgacttgacacttttgtgtgacttgagccactgtgcccagcctgaacaccctttcctggtaaaacactccacaaaccaggaagagaaggaatgtactgcaacaaaataaaggccagtcatgcaaggcccatggctgaaagtctttcagtcattttagatgaaagactgaaatctttgcctccaagatcaggaacaagagaaggatgcccgctctcactacttctattcaacacaggatttgaagtcaggccgggcacagtggctcacgcctgtaatcccagcacttttggaggctgaggcgggcagattacttgagcctatgagtgtgagaccaccctggccaacatggcaaaaccccatctctactaaaaaaaaaaaaaaaaaaaggatttgaagtcctggccggagcaattaggcaagggataaaaaggcacctaaggcccttttgcaataagaagccagatggataaaggaagtgctggtcaccctggaggtgtactggtttggggaaggtccccggcccccacagccctctggggagcctcaccctggctctccccactcacctcagccctcaggcagcccctccacagggcccctctcctgcctggacagctctgctggtctccccgtcccctggagaagaacaaggccatgggtcggcccctgctgctgcccctgctgctcctgctgcagccgccagcatttctgcagcctggtgagtacccaggaccgcccaggtatggtctctgcccaaaccacaggaggggccaacccaagacaaaggcagaacatctggggcaggggccaggctcccacctccagcaaacaagggcgggtcccataggggtgggtgccgccatctcttccccctccaccctcccccatgcctgaagagtgggagacccaggccagaggtcagtccagccacctgtcacacgactgcctgtgggtgaaggtgtgggagggtctggggtcaccctctttgtgtcctgaggtggtttcaaggtctctcccccactcactccctccttcctctaggtggctccacaggatctggtccaagctacctttatggggtcactcaaccaaaacacctctcagcctccatgggtggctctgtggaaatccccttctccttctattacccctgggagttagccatagttcccaacgtgagaatatcctggagacggggccacttccacgggcagtccttctacagcacaaggccgccttccattcacaaggattatgtgaaccggctctttctgaactggacagagggtcaggagagcggcttcctcaggatctcaaacctgcggaaggaggaccagtctgtgtatttctgccgagtcgagctggacacccggagatcagggaggcagcagttgcagtccatcaaggggaccaaactcaccatcacccagggtgagtccagctgccctgacacctgccttgcccaccgcagtgagggttttggtgaccactgatgtcttcacatttaaacccagtggtctggattgagagctgttagcatttcaccttgctaccccttccatgtctgggcttctgagagcagcttgctcatcctgaatgtccccaatctagaaagcagcacaccatgcctttcatccagacgccccacacccccagaagagggtctgctcattcctcatctcttccagctgtcacaaccaccaccacctggaggcccagcagcacaaccaccatagccggcctcagggtcacagaaagcaaagggcactcagaatcatggcacctaagtctggacactgccatcagggttgcattggctgtcgctgtgctcaaaactgtcattttgggactgctgtgcctcctcctcctgtggtggaggagaaggaaaggtaagtgcccagaacgcactgtctcctcaagcttcccagctgggggtttctctgagcccacctgcagctaagggacttcagaaatatgcagaccctgctggctcccctcaagcccaccaaggccgactctggcctgtgctggggcgtctgcatctcgggggcctcctgcagtggggtggtgcagggtcacatgtgagaacccccagcctgggcgcggtggctcatgcctgtaatcccagcactttgggagcccaaggcaggtggatcacaaggccaagagatcaagaccatcctggccaacatggtaaaactccatctctactaaaaatacaaaaattagctgggcatggtggcacacgcttatagtcccagctactcaggaggctgaggcaggagaatcgcttgaacccgggaggcagaggttgcagtgagtcaaggtcgtgccactgcactccagcctggtgacagaacaagactctgtctcaaacaaacaaacaaacaaacaaaaaaagcccccagccctctccacacagctggatccccccaacttctctctcagtcatcaatcatccacgctcccctgaaggttcctggggaggggagggcctgccctgggaaaagaacagagagaggagaagggaccagaattgggctgagctcagcaggcactggctgactgccctcctgccacggcctggcttgaaactggagaagcaaagtatataaagcataggctctgctctcagggaactgggggtgtggagttgtcagttgcctcaaggactaattgcttcattgagaaagaactatggtattgctaaacaagggtgggaggagagagaggtaatcagggaggacttcccacaggaggtggcatctgcagatgtctcaaaaaagaaaagaattagcctggcaagaggtgaggattgtgtagaggtcactcactttccttgtgggtggaggaaaccattccaggagctgtaggaagcttggtgctggtgaaggaggcaggagaggagagaagaggagatgaccttagaaatcacatccaagagcctctgatcccagaggcagcgtgaggcagcaaagggtgacctcagttccccatgagagacctcagtctatggaggaatggccagaggtgggccaggctgggtcagtgcagtgcaggagtgaggtggagagagggaaagggccagatcctagaaaagattaagtaataaaaaccaatgagattgttagattgatgtaggggcaagggagcaggaagaagcacccgtttccacttgggtgcatggggctatgatgaaaccaccaactacagtagacaatagaggaggagactatgtttggaggggagcgatgcctcgtttagttcggaatttgtttttttgttttgttttgttttttgtttttgagacagagttttgttctgtcgcccaggctggagtgcagtggcacaatctcggctcactgcaagctccccctcctgggttcaagccattctcctgcctcagcctcctgagtagctgggactacaggcgcccgccaccacacctggctaattttttgtagttttagtagagacggggtttcactctgttagccaggatggtctcgatctcctgacctcgtgatccgcctgcctcggccttccaaagtgctgggattacaggcttgagccaccgcacccggccagtttggaatctgttatacgggagatccatgtgtggcatctcagcagagttgtccattggaaacttggatgtacacatttccagttcaaaagagaggacaaggctccaggcagcaatgagttctacctcaatatcctccaaacctgacagtaagttaccatcaagaaagtcttcaggccaggcacggtggctaatgcctataatcccagcaccttgggaggccaaggcggctggatcacctgaggtcaggcgttcaagaccagcctggccaaaatggtgaaaccccatctcaattaaaaacacaaaaaattagccaggcatggtggccgacacctgtagtccaagctactcaggaagctgaggcaggagaattgcttgaacccaggaggtggaggctgcagtgagccgagatggtgacactgcactccagcctggctgatagagcgagactccatctataaaaagtaaaaaagaaagtcttcagtgaaaggagattcgccctatcagctatgaaagcacagaggggaggaacatggagtaggggctgcctgcagtcagatcctgccctcacaaccttgccagggaaacaggctcgtgggtacaaaggttgtgtgcctcaacttcctcatggaagcacgtgagattattttataaccatagagtggagacagtcagtatgaccaccaaacccaggagccatatattaaaatactgataaatttaactatataaaaaaatttttgccgggtgcggtggctcacacctgtgattctagcagaaaatcagatcaggagatcacagaaggtcaaggaactactgagagagcaggaatggagagcaggggggtcagcaggaagcttggagaatctgcaaaatagtagattacaaaggatcaaaagtcagtgaggttcaacaagaggtagggtgggataatgaccaaagacagagggaacacttccaggttcattctgtgaggtcagcaacaccatgacctaaaagccagataaagaccctgcaagaaaaacaatacacaaaatacagatgaaaaggctggtgaatattgatgggaaaatcttcaacaaaattctagcaaaccaactttcacagcatgttaaaaggactgtacgccatgaccaagttggagatagccctggaatgcatgtatcacccaaaacaggaaaattaatgtagtgcaccccattagcagaatgaaggacaaaacccacatgatcatctcaactgatacagaaaaaacattggacaagattgaacacctttccttttttttttttgagatggagcctcgctctgttgcccagcctggagtgcagtggtgccatcttggctcactgcaacttctgcctcccgggttcaagcgattcttccacctcatcctttcgaggagctaggattacaggtgtgcaccactatgcccggctaatttttgtatttttggaagaaacgtggttttactatattggccaggctggtctcgaactcccgacctcaagtgatccgcccaccttggcctcccaaagtgctggcattgcaggctgagccacggtgcccagcctgaacaccctttcctggtaaaacactccaaaaccaggaaaagaaggaatgtacagcaacaaaataaaggccagtcatgcaaggcccatggctgaaagtctttcagtcattttaggtgaaagactgaaatctttgcctccaagatcaggaataagagaaggatgcccgatctcactacttctattcaacacaggatttgaagtcaggctggtcacagtggctcacacctgtaatcccagcacttttggaagtcgaggcaggtggattacatgaggctatgagtttgagaccaccctggccaacatggcaaaaccccatctctacttaaaaaaaaaaaaaaaaaaaaaagatttgaagtcctagccagagcaattaggcaattaggcaagggataaaaaggcatctaatttgaaaaggaacaagcaaaatgatctctgtttgcaggtgacaagatctcatatgtagaaaatcctaagtattgcacaaaattacctgttgaatgaatgaattcagcaaagttccaggaaaccaatttaacatgcaagcaaaaatgtattacatttctgtgcactaaacataaacaatctgaaaagaaaattaagaaaacaattccatttacaataatgtcaaaaaataaagtaagatctttaggaataaacctaaccagggaggtgaaagacttgtacactgaaactacaaaacattgctgaacaaatgaaagaagacacaaataggtggatgacattcttgttcgtggagtggaaagattaatattgtcaaggtgtccatgccaccaacaacaatctccagatccaatgcaaatcctatgaaaaccccaatggcattgtttttgctcaaacaaaaaattcatcctgaaattcaaatggaatctgaaagcactaccacaaaccaaaataatctttagaaacgtgaacagagaggacacgcattccctgatttcaaaatgtattaaaaactatggtaatcaaaacgatgtggtactgaaataaagacataaataggccaggtgcagtggctcagcctgtaatcccagcactttgggaggctgagctgggtggatcacctgagattaggagttcgagaccagcctgaccaacatggagaaaccccatctctactaaaaatacaaaattagccaggcgtggtggcgcatgtctgtaatcccagctaatcgggaggctgaggcaggagaatcacttgaacccgggaggcagaggttgcagtcagccaagatcacgccattgcattccagcctgggcaacaagagtgaaactccatctcaaaaaaaaaaaaaaagacataaatagagcagtggaatagaatacagagcccacaaataaaccctcacatagatagtcaaatgatcctcaacaagggtgccaagatgaccactcgacgaagaatagtttcttcaacaaatggtgttgagaaagctgggtactcacatgcaaaacataaaggtgcatctctgccaaaaaattaactcaaaatggattaaagacttcaatgtaagacccaaaactgtccagtgtctagaagaaaatacaggagaaaacatagggtgatgagacaagatggtgggtccttgcaccatcatccccagacccatggtttttattccacaggggaaggatggtttgtattctacaggtgaagtatgatcacatcaaggttgtttgactccagggcaggatttatgatacgtacctgctcttacacaagaacgatagatcaactggaaatcttagaggccttcccagaactggggttaatcagaagctgccatggcagattagcttccaagatggagttgccttagcctccacaatattaaaagtagaactaccatatgatccaacaatctcacttctgggcatctatccaaccaattgaaagcagggtcaggaagaggtgtttgcacaccgatgtttgtagtagcattactcaaaataccccaaacgtagaatcaactgaaatgtccatcaaacaaaatacggtgtctgtagtccaagctactcgggaagctgaggttaggagaatgacctgagcccaggaggttgagggtgtagtgaactatgattgtgccactgcactccatcctgggtgacagtataagatcctgtctattaaaaaaaaaaagttctgaaaaaaataatattattgaatcttttttatttagttatttattttgagacaaagtcctgctttgtcacccaggctggagtgcagcagtgcaatctcagttcactgcaacctccgcctcctgggttcaagggattctcttggctcagcctcccgagtagctgggatcacaggtgtgtgccaccacacccagctacttcttgcatttttagtagagacggggtttcaccatgttggccaggctggtctcgaactcctgacctcaggggatccacccacctcggccttccaaagtgctaggattataggcgtgagccactatgcttggcctcaacctttaaagggaaggaaattcttacacatgctgtagtataaatgagccttgaggacattatgctaagtgaaataagctagtcacaaaaagataaatactgtctgattccacttacatggtatctagagtagccagattcctagaaacaggaagcagaaaggtggttgtcaggggcacagaggagatgagaatggagagttaatatttaaagaacatagaatttcagttttactggcccagtgtggtggctcacgcctgtgaggaacatgccttggaaggctgaggtaggtggatcacttgaggcctggagttcgagcccagcctggccaacatggcgaaaccctgtctctactaaaaatacaaaaaataagctggtgtggcgggggcacctgtaatcccatctgctcgggaacctaaggcaggagaatcactggaacccaggagatggaggttgcagtgagctgagatcacgtcactgtatagcagcctgggtgacacagcaagactctgtctcaaaaaaagaacttttgggtttcagtttcgcaagatgaaaatgttctggagatctgtctcacaaccatgtgaatacacttaacactgccaaactgtacactaagcaatggttaggatggtaaattctaggtggtttttttttttttttttttttttagacagagtctcgctttgtcacccaggctggagtgcagtggtgcgatcttggctcactacaacctccacctcccagggtcaagcaattcttctgcatcagcctcctgagtagctgggagtacaggcacatgccaccacgcccggctaatttttgtaattttagtagagacaggttttcaccatattgttcaggctgatctcgaactcctgacctcaggtgatctgcccaccttggcctcccaatcctgggattatcaccgcgtgagccaccgcacccaccttaggtgttaggctggaaggagtgaaagttgcaatatgaaaatgatactagcagttaatatttcagagttcccagtcccaacattaaaaaacaaaaaacctgtagaagtggaaggggaggtccctggagttgaggggtgccgtgaggcctgggttcagagggtgtctctgtggacgtggagccctcccaggagggggctggatggtggaggggatgtctgtggaccaggagcccagtgcttgggaaacactgcaaggatgccagggggacaagaggggcagggcacagtgggagaggcagcagaggattcagggtgagaccagccagaggggaggggaggcctagaggtggcaacagaacttgaacagccacaaacatgagtcccaagcatgaggctcccaaggctggagggcagacacagccgccacccagaaggaaaccacaggcgcggtctccctgaggacctggagggagaggtgggggtgcctatgtcaagggaaggggagggaaggaagagatgggtgggcgagggctcagcgatagagggagccaggttggggctgagcagagagctcaagagcgaaggaagccaacagagggtagcaaggttttgcgggggcggtttcaggagatgacgtggtggacaacagggagaacaggtcgggggggagcctcagggtgccagctgagtcccaggcccttcctgatgggtttgggcagagctgatctgctgctctggtccctctaaggagggcctcagcctagggcgcagcagagaaggtgggatggagactgctatcacctggatgccaccctgactcactgttggtccccctacacgtcagcagcggactaaagccacaaccccagccagctgagtgctgggcctccccaagggagtggggagtacaggtgcgggcaggggacgggtttggaaatcagggactgtgctgctaagaaccccacaagcccagcctgccacaaattctcctgagtttttgccacctcccacttaaatctgatctctgaagcaactgcctcgcctgcctcactaataatcctggccctgcatctaaaaacacttcccctcctgcaggtagcagggcgccaagcagtgacttctgaccaacagagtgtggggagaagggatgtgtattagccccggaggacgtgatgtgagacccgcttgtgagtcctccacactcgttccccattggcaagatacatggagagcaccctgaggacctttaaaaggcaaagccgcaaggcagaaggaggctgggtccctgaatcaccgactggaggagagttacctacaagagccttcatccaggagcatccacactgcaatgatataggaatgaggtctgaactccactgaattaaaccactggcatttgggggctgtttattatagcagtgcaaagagttcctttatcctccccaaggatggaaaaatacaatttattttgcttaccatacaccccttttctcctcgtccacattttccaatctgtatggtggctgtcttctatggcagaaggttttggggaataaatagcgtgaaatgctgctgaca

SEQ ID NO: 813 - DNA, 31718 bp, Homo sapiens
agaagggaggtagtcgccctccgtcgtggcctggcgtggattccgagcgttggtgtctggcggtttccgaccgttggtgtctggcacgcgccaccccgatgtaccaggtaaagccctatcacggggtcggcgcccctctccgtgtggagcccacctgcatgtactggctccccaacatgcacggcaggagcggcggcccagcactcggcactggccacttgcaggtaggagcgcggggcccccccgcccactgcgcacgcgcggcggcccgttgctggcccaggtgcccctaggccggatagagtgcgtcccaaccgattcgcggccccaccccggcatctgtgccggccggccagggggtcacccagatttttatgttttaaaagatttattcaggccgggcgccgtggctcacgcctgtaatcccggcactttgggaggccgaggcgggcggatcacctgagatcaagagttcgagaccagtctggccaacatggtgaaacctcgtctctactaaaaatgcaaaaattagccgggcatgtgtcgggcgcctgtaatcccagctactcgggaggctgaggcaggagaatggtttgaaccctggaggcggagcttgcagtgagctgagatcgagccattgcactcgagcctgggcagcaagagtgaaactccgtctcaaaaaaaaaattattatatatatatatatttttatatatgttaaatatacctttattatgcgtattatacatattgtatattatgtgtaatatataacatgatatattataaaatatatattatatatatatatatctttcctggtcgagcgcggtggttcacgcctggaatctcagcgctttgggagaccgaagcgggaggattgcttgagcccggagagtttgagaccaccctgagcaacatagcaagacccttgtctctatgtttttttttttttttgagttggagtcttgctctgtcgcccaggctggaatgcagtggcctgatctcggctcactgcaagctccacctcccgggttcacgccattctcctgcctcagcctccccagtagatgggactacaggcgcccgccaccatgcctggctaacttttttttgtatttttagtagagacatggtttcaccgtgttagccaggatggtctcgatctcctgacctcgtgattcgcctgcctcggcctcccaaattgctgggattacaggcgtgagccaccacgcccagctgccttgtctctattttttaaatgttttaattaaaataaaaatctatccatattttttctttttttttgcgtatggctgcttaaacattttagttcagaattctatcctctgaaaagtgagtagcacataaatgctcattttgaggaattacaaagcgaaccccagggtcaccacctcccaggttgacacacattgtgaccgctccattctttccacttaaaccttccccaccaacatcccagggcccgatttttatggtaattatgtcctgcttgtctctattattttgtcagctaagtatccctaaacaatatggtctggttttttgtttgtttttgtttgtttgtttttttcagacggagtttcactctgtcacccaggctggagtgcagtggcatgatctcggctcactgccaccttggcctcctgggttcaaggaattctcaggcctcagcctcatgagtagctgagattacaggcgctgtccactgcacctggctaatttttgtatttttagtagagacggggttttgccatgttgaccaggctggtcttgaactcctgacctcaggcgatccgcccgccttgaactcccaaagtgctgggattacaggtgtgagccaccgtgcccggcacctaaacaacatagttttgatataggtaagcatacagcatatattttgatgtatttcaggtaatttagtctaagaacaggaaaggacagaaaatgaacacaatttgtagttctttgttgttaacaaactaagaatactttgcttaaataagtagcaatgagaatgtaactcagtaattcatacaaatagacaagaagacaagaaaatgatttgaggacagcttcaatcgcggtgtgaagaagaaagcaacaaaacgaccactgaaaacaatgccggtgagtcagccagttttgtttttgaatcttgtcagggaagcagcccagctattcgggaggctgagacaggagaatggcacgaaccccgggggcagagctggcagtgagccgagatcacgccactgcacgccagcctgggcgacagagcgagactcagtctcaaaaaaaagagaaaacctaagaggttcaggtgatatggttcaaaaaaggacaagatttacaaagtattaagggacggaaataggaagaagagaaatttcgaagagaaaagaaaagaaaaggatgtttggttatagagatacaggaaggggactcaaggaatttttttttaaagggaaaaaagttaataaacttcataatataaaaatcaattattttaggactgagtctaactcagactctgctgtggaattggcagcgtaagcctacttgtgtgataatgatgaaaccaagtgttaatgtcactgttacctttttttcatatttctgatctttttatgtgtatcaggtggcaaaacatccaaagaaagggtcccaagtggtacatcgtcatagctggaaacagtcagagccaccagccaatgatcttttcaatgctgcgaaagctgccaaaagtgacatgcaggtaaagcagtgtcttacctctgttgataccatctcactttttgtaaggtggtaaggacaagtgtctacaaacttgatttgatgtgaacattttagtgagtgtaacatatcaagaaagataagattatggggtgaatccttggagtgatagaagggtaaccttgaataagagagcatgttcttttttttttttttttgagacagagtctctttctgttgcccaggctggagtgcagtggcacagtctcagctcactgcagcctctgcctcctgggttcaagcgattcttatgcctcagcctcccaagtagctgggcttacaggcatgtgccaccatgcctagctaatttctgtatttttagtagagatggggtttcgccatgtcggccaggctggtctccaactcctgacctcaggtgatccgcctgcctcggcctcccaaagtgctgggattacaggtgtgagccaccgcacccggcttcgagagagcgtttcttttcttaaagcgtgttcttttcttaaaggtatcacaggagtgattatgcctttgttgattgatggagcagatggggagaggcattgcatgacatgggaaggaagcttagatgtgggtggcaccttgttcacccatgttattttttagctccatcttgacaattatacttaattatttttccctctctctgtttctttttttataattttattgaagttctaatatctgaaagtgtacaaagcgtatatgtagtttaaaaaataaaaatgagatatcacccagatctctagccccagctcaagaaatgaaacattaatagtgctgtagagatcctttgtgtaccttctttctaccctacctcacagtccccttattacccataggtaaacactagggtgaattttgtgttaatctttgtcatttcattatagtgttaccactatgaatgtgttctttaattatgtaaatgaatccattattcaggcttctgtgatttaattatttcagttaacattgtttgagatttatccacattaatgtgtaattttatagtttctgggaaaatatttaaaattttcaaacatacagaattttgctagttatattttcgttatttgatttctaactttattgtgttgtagtcagggaatgtggtgtttgaaatttatgtaggggctgggcgcagtggctcacagctgtgatcccagcacttggggaggctgaggcaggcagatcacttgaggccaggagttcgagaccagcctggccaacatggcgaaaccccatctctactaaaaatacaaaaattagctgcatgtggtggcatttgtctgtaatcccagccacttgggaggctgaggcatgagaattgcttgaacccaggaggtggaggttgcagtgagctgagattgtgccatggcactccagcctgggtaacagagtgatactctgtctcaaaaaaaaaaaaaaaaaaagacatttatggagacttagccttatggcctagtattgagttggtacattcgttttatcttttctgtttctttttccccctttgcttactttcctctggatttcttatcttctacaaggacctgagcacattttaattccagttgtcttttccaccttacatgcagttgtacagtgtgttagttttttatttgaaacggagtcttgctctgtcaccaggctggagtgcagtgacgcgatcttggctcactgcacctccgcctcccgggttcaggcgattctcctgcctcagcctgccaagtagctgggactacaggcacccgccaccatgcttggctaatttttggccaccatgcccagcctgaatgaactttcaaaattggtttttaaaagaggtatggaggccgggtgcagtggctcacacctgtaactccagcactttgggaggccaagacgggcagatcacttgaggtcaggagttcgagaccagcctggccaacatggcgaaaccccatctctactaaaaatacgaaaaggtagctgggcgtggtggtgcacctgtgtattcctttcatctttctcattataggatttctgacaggactctgggcccctccccagctccactccctacctcaagaatgtgaccatttggaaaaggcaaagagaaaaggagcaaaatgaagcattcccccaggcttcagccctgggctctgaggggaaagagtggggcattgtttttctaacctaacctttccctctggtgatgttggggtagagaagccgagagaccctgtcctccctaatgcactgtggcccagtccccttgcctttttcctgttctgtttggagtggagaagggcagcacctctgtgtttaatggaagtagcccatagtctcctggatttttggaacatctttttcagcctattttgtgtcctaatgattcactcaataaacatgtttgaatccacacgttcccaaggtgtggcttgagatcgttaaactgatggaggtcaggttcttggtccgccttgtcccatggcccagtgtataggtgtccccacaccccgcaggtgctttgtctacaggctctccaggaagtattgcttagtaactgagaggcggggtgaggcagtagagatggggagagtttgactgcctgtgagtagtttatctagtggcctcagcctctgcagtagtaaaagttgtgctgacaggtggcagagtggagcaggaccttgtgaaactacctgtctcacccacgtgagccaggccagaccctgtgtcctggcagccttcatccatgggttctttccaaaggaaattttatcctctcatccgaaagatacctgtcataatttggaatttgatcaaatcacagtatctgagagttaaaaggaaactaaggagttactctaaatgtccaaccctaaaatccaagtgacaatgtcaccttcactcttgccttctccagctagttcttcaccaaattctgtcaagacttggtgaagaaaattctctggcctatgtcctccacacattgtcaccatcgtctctcacctagactgccacagtgcagcctcagggccagcctcttgaaactcagacagacttgtttgctcttgttttgccttgtggagcagcacagcacctctcttctctcttgtccctctgacaagcagtatttgaagacagatgttgtcattttgtactttcactgttttcttttgtggtttaaggaatgcttcagcctttctctttagatataatttctagttcttcccatcatgggcacctgctttagtgacaggttctcactgtggtctcctaggccagacacagccatccagctagtgatctgtgcagaaggagccgtgacttcctgcgatcaggtcactcagccaagaccgcctcgccccttccattctccctcccctcccccacctgcccctcccagatgaaagctagaagaaattgagttgtgagtctccttttggaaaggtagccctgggggagtccgagctggggtgtgggggaaggctaactcattcggcgatctttagcctgtattcaggtagaatagttctggggaaaggagcctgttttgtgggatgagggaacagagtgggagaactgaggagaagatgcggaggtctttaagaatccaggaggggaacgattcctgagttatttaaataccaaccaagctaagggtgcttcacaagaggataagagcagcttgggggctttgcatcaatatggacacctgtgtacagccaggcagcccagtgcactgggttgagtcacagccttagaatctgggagcttgacaccatgctctctaaagcctttgacactgtttattgagaggctgggtctaggttgtctcctcttgaatatgggcttcgtgatgcttgactaatagaagatggtggaaatgatgccatgctagttagtgggcccagattttaaggaaactggcagtttccgtttcctgtctcttcctgtacctgggttcacactgggaacccggtcaccattctgtgagcaaggccagcagtcaaaggaaaaggccgtgtgtaggtgttcttgccagcagtcctcaccgaggtcccagccaacatccatgttggctgccagactcagtcaagacgggagtcagatgattccaacctcccctgtttttcagttttcccagctgaggtccagacatcagggagcagagacagcccatcttttctgtgcactttgcaaattcctgactgtggagtccatgagcataataagatggtggttgacagcactcagtctggaggggtttgttacgtagccaaagcaactggaactgggccttagagtcataagactcccaatgttaggacatttatatcaaggtttttttaaaaattgtaagttatataaacatatactaattcttctatattatacacattaaaaatgtaacacatgagttgaaataagtgttttaaaatatttcattggttagcactgcaaaatacctttttgctcttttttttttttttttttttttttttttttgagacggagtctcggtctgtcacccaggctggaattgcagtggcacgatctcagctcactgcaagctccacctcctgggttcacgccattctcctgccttagcctcccgagtagctgggactacgggcgcccgccaccatgcccagctaccttttgtatttttagtagagacgaggtttcactgtgttagtcaggatggtctcgatttcctgacctcatgatccgcccgcctcggcctcccaaagtgctgagattataggcgtgagccaccgcgcccggccaccctttactttcaaaaaagggtttagtgagaacaaagtgagaaacatttttttaaatcatggttcaacattttctgaagttcagttgaaagttcagtttagtgctgggtgcggtggctcaggcctgtaatcccagcactttgggaggccagggtgggcagatcaggaggtcaagagattgagaccatcctggccaacatggtgaaaccctgtctctactaaaaatacaacaaaattggtggcatgcgcctgtagtcccagctactcaggaggctcagacaggagaatcgcttgaacccgggagacggaggttgcagtgaaccgagattgcaccactgcactccagcctggcaactggacgagactctgtttcaaaaaaaaaaaaaaaaagttcaatttattctgatacttaattttaatgaccttcataactgccaggagtacctctcaaaaacaggcaaatccaagtggattaggtgcctctttgcagttaccactttttaaatagatccaaacctgctgaaaatcttcatctagaagacttgtgaacaggtcagaggatgatttcccggcgcagacaacagtgctctcatgaggacaggcattgtctgggagcacaaaacctgaagtgtgtgagctgcagtgtgtggtgatgggctgggggtttgcctctcttccctcaggatactgatcattttccaggggaatcatgacttatcatgtttttatctacacttgatcttggccaaaaggccaagaagcgatactgtctttttgtcttaaaaggttagaatgtttctttatttctactgcacaacatctgtggatacttttttgtgcacgccctcaccctgacaggctcagctgtgaagggttcatgccagcaagccccctgctggccgtccaggacagcccagggctctggcttctcagcagcacctcccactggccaggcccaggccaggctggacaagctgaggccagcttaggtagcaggcatggaggcctttgcccagcctggtaagtgatgcagagcagtgcttttcaggggctggcactgtagggtccagccctactgggtctgtgggtttttctcctcgtgtgcggagatgagagatggtagaaatgaagacacaagacaaagagatagaagaaaagacagctgggccagggggaccactaccacctagacgcggagaccagtagtggccctgaatgcctgacagcgctgctatttattgtatacaaggcaaagggggcagggtaaggagtgtgagtcatctccattgatagataaggtcacatgagtcacgtgtccaccagacagggggcctttcccttttaggtagctgaggcggagagagagaggacagtgtacgtcattatttcttctatgctcttctcagaaagatcaaagactttaatactttcactaattctgctactgccatctagaaggtggagccaggtgtacagagcggaacatgaaagtgaaacaggagggtgactgctgaagcacagcatcacagggagacggttaggcctccggatggctgtgggcgggcctgactgatgtcaggccttccacaagaggtggtggagcagcgtcttctctaactcccccagggaaagggagtctccctttcccggtctgctaagtaacagttatcttcccaggcactggcaccactgctagaccaaggtctgctaagtaacgggtgccttcccaggcactggcattaccactagaccagggagccctctagtggccctgtccgggcgtgacagagggttcacactcctgccttctggtcacttctcaccatgtcccttcagctcctatctctgtatggcctggtttttcctaggttataattgtagaacaaagattattataatattggaataaagagtaatgctataaactaatgattagtaatattaatatataatcatatctataatctatttctagtatcactattcttattctatgtattttctttattatactggaacagcttgtgccctcggtctcttgccttggcagctgggtggcttgcctcccacatggcactgctgggcattgtctgttaatattgaataattgttttaagattattttcaatgattttcaataaggctttaccttttttaacttgcagtgtggccatgaggtctgccggaagtgacttgttggtgttatctcctgagttaaaatgtgaagggatttttttttttcagattactgagagtcttcagttactaggtaagtcgccccatccttattactccaggtgacactgactggggtttatgggatgaaagaggagtgtgtgcttggatgatggggtgtgatagtgaaggggtgaaaggtttcttctcacacatagacatcgtgaggtcttccttgagctctttagagccttccctcgggataggatgaaatactgagatcctagaaaggattcacaagacgagtcactcatcagtgcagattcaccgattcacccctagatgtgtgtgggatttggatggcagagagaaacaggcactgaagatttttggtcaggacagggcagagaaataaggagaagagttgaaaattcaccaaaggatagataaacccggggcgtttagagaaaacctgtagtgtgcaaaggagcccagaatcctggggaaacttggagggaaatatacttaatttgattcactaagttaggcccagtgaagggattgggtggcataggtagaagccgaaaaataaagcatcttgtattgctggaatagcctctgtttctgaggtcacatccaaacttagcgaggcagcttaacctggtgagagacacgggttcaactcctggcttctgcactgccagggcaaaggactgccgtttgctgacacagtcttgtaattcaatttaattttttaaccaaggtgtgggagaaggcagctccgcataatgctgaatattatgggttctgaagcgaaaatttttgtcagggtttaaattttggcttcattgtgtaagtagcccttccaccccgggcaagttatttcccacataaagcaattgctaagtatggagctgatgtacgtgcatcactgagaatgggtttagcacatagtatccactgaagacgctatcttgcattagctgtattactgtgataaaggataagctataattaaagttacagaggaacaaaagcagcccttttcacaacatttaaaacatgcatgtaaaaataaatgcagcagtgacaagtcttatgctacaaactcagaagagcagaaacaactttatttttcctctatgatttcaagctctttttctgcccagctgctgagaaaatttaactcctgagtcttcttggcttccttccttttccctaaggttgtgtcaagtgccaaagcatttaggggagggaggaggcctctagtcctctgtcaaaaatattttggatttttatagtcatttccctttctctgtggtgagactaggccctccaggaccctgtgttttggccccaggaattgaggccatctgaatcagctgcctgggttcctgtctgcagtgggccccatgggcctacagaagaacagaggctgctcagggctgggctgtttgctgcccagaaccaaggctaggatgaggagctcagactcttccagtggaagcagtgctaggacggaagacagccgcccctgaagaggggacattgacatacagttgatctgcctgggaaggtgtaatagagatgaacttgtgtcatcgcatctttcacacaagccacaaagaaagctaatcctgattcctggtgagaagaaaccaaactcgaggaatgttttatatcacaggacggtcacagcctgtactggggcacgagccagggctgagtagagtgctgcccctgcactcactgacttgatcctctcatttactctgtggagcagtccctgttgggatcctgctgctttgggaaattgctctgttaagcttgcagagctatgaaattgtggccctatttcaaacccatgagggcctgattctacagactgaccactgggctcttttacttcagcaggacttgggctggggctgcagggatttcaccaaggaatgtcaggcaggaggtggccattgtgaaacctgtcccatcttgcctgtacctcctggctgaaagtgggatgcaggacttagattgccaagcttaggaattatttgtggctctgctgttcacaattttggagaatgttaaggaatactcaagaagttgtgagagtaagggccctcacatatatcagaacatgaaagcattccagttaggaccttgtgatattgaaactagaataagcaacccagtggatagactgtgaaagagaatccacatatagacctatgtgtaagaatttatgatcaaggtggcattttgaaacagtagggaaggagcccagcagcaaatggtctggggaatcctggccctccacctgagacgttacacggctctttttttgagacggagttttgctcttgtgcccaggctggagtgcaatggtgggatctcggctcaccacaacctccgcccctgggtttaagcggttctcctgcctcagcctcccaagtaggtggcattacaggcatgcgccaccacacccagctaattttgtatatttagtagagatgggatttctccatgttggtcaggttggtctcgaactcctgacctcaagtgatccacctgcctcggcctcccaaagtgctgggattacaggcatgagccactgcacccagctacacagcctttttttttttctttttttgagacagagtctcgctctgtcacccaggctggagtgcagtggcgcgatctctgctcaccgcaagctccgcctcccgggttcacgccattctcctgcctcagcctcctgagtagctgggactacaggcgcccgccaccacacccagctaatttttttcgtatttttagtagagacagggtttcatcgtgttagccaggacagtctcgatctcctaacctcatgatctgcctgcctcggcctcccaaagtgttgggattacaggcatgagccaccatgcccggcctacacagcctttttaacaccacctccaaagtaaagttcttcatggactaggaagaaactctttatagagttatgcataaaaacaaagccataaaaatattttcataatcttagccttcctaaggaatacacaaacagaaatgataatgttaaagatcaagcctcatgagaattcaaacagggaggggaacagaaggagctggccaaaggagaactttgtgttctatgttgtttgaatcttacacaatgagaatttaggggataatgtgacttaaaaaattgaaaaaaaaaatgaaaatggtgggtagtcaactttgcaccatggcttttaaatccctcaataaattctgggctccccatattggggtgaataaaagacacacttcctccagggctcagcatccacctgtgaaaatgcccccaggactgtcgagaacccagctgggaggccacttggatgattatccaagaagtaagggcgcagtactttggggcagcttcctgaaggtggtgggatttgatctccttcttacaaagtgggatttcagcaggtggtgtagggaagtttaaattttttccctgaaggtttgataatctgagtctatgaaacaaacataaaacattaacaggaaaaaaaaccgacttaaaaatgttactacgtgcacacatgtgcacaagtcatacaaaatatataaaaaaataaatggccagatggttgacacttttatacccatcttgaaattacagaaataacgggaggcctggagcgcagcaagacagattaggggaaggggagaggagagacttggctagcaaaggtcttgttctgcaggtgacatctcacagctggtactctgcggagcctgtggtaggcaagtccttcagacccttaaaggggtccgcctctcagtttgtctttcctagatccagacacggggactgcagagaaaggctgtgtgcatccgctgtctactccactgtctcctctgcagaggcggatttccctgactgaagaccatgttgcaggcccacagctgcctacagaaccgtcccaaaatatggcaaagaaacctattctgaggttaaatattttggtttctttcagtgggaggcaagggtcttccggactagggaggtagatgtgcagcagcctcaggtgctctaggtgctttgtagctacgctggccaggccacctgaggtaggtcccctttgcaccagtctcacaccctgctgggggatggtagtggagacagcagtaaaagcaggtctgaggcaggtgtggagattagtacaggtggcctgggcgaagggcaaagggtgaagagaatgttgggagccatgggtgactggctgcgggcataggcaccatgaaggctactatgggctgcagggtgtggatgaggggacagagtttgccccagagaccaagttggtttgtgtcaaacaccacaggatttttattttgtatttttttttaatttttaatttttaaatttttttttgagatagggtctcacttttacccatgctggagtgtagtggcgtgatcttgggtcactgcagcctccacctcccaggctcaagtgatccttccgcctcaacctcccgagtaactgggactacaggcgaaagccaccacacccggctaatgtttattttttgtaaaggcagggtctcactatgttgcccaggctggtctcaaactcctgggctcaagtgatccacccacctcagcctccggaagtactgggattatagtcatgagccaccacatccagccagcaccacaggattaagcagacatgatgagtctttgacacaggggcaaaccaggacccagagaggtgacttgggacagggctgtctcttcagtccttaccacaccgtggacgagatcaaccttaagacagcaccctgggctctcactggaccctggattctggctcacagcacacaaagcaaactgatccctggaaagggtcacttgttgctgcctagcagcattctggtaggttggcatcctcaaagtgacataagcagtgaagcaattcagagcaacatttatttatcaagacagggtctcactctgtcacccagactggagtgcagtggtgtaatcacagttcactgcaacttctgcctcctgggcttaagcgatccttcaacctcagcctcccaaatagttgaaactacaggtgcccaccaccactcctggctaattctttctttcttgcttgcttgcttgcttgcttgcttgcttgcttgcttgcttgcttgctttctttctttctttctttctttctttctttctttctttctctttctttttctttctttctttcttcttctttctttctctctctttttctctgtctctctctctctccctccctccctctctctctctttttctttctttctttcttttttttttttttttgtagcgatagggtctcaccatgttgcccaggctggtcttgaactcctggactcatcctaaagtgctggcctctcattccctgtctgtgcacacctcacggcaagggccagcctgtttcctcccggtcacctccaaatcttgctgcttttaattcaactcagaggtatgcacttgaggtaggagggcaggggaagtggggatggcaggacatggatggcccttgaggcattggctctgggtgtcatgggctgtgagagtcaagaagggcagtggcctgcctgacttgggttcgaaagggtcactctggccactgcggtgagaactgaaactagccaggccaattctccattgttcctgctcttccaggtaggagaatattagattaggtctggagtcagaaggtagcaggggctgggggttgcagggggatgttgagaagaagtggtcctttggtcagggtgggaagccaacaggatttcctggtgcattggaggtgaaagggaagaggcgctggtggttgtgctttgggcctgagcagccagaagccgttgccatcacctatgacaagggagacagcgcctggggcagagcccagtatggggtgcattcagggtagatcaggaggtatgagtgggcagtgggcgagccaggctgggggttgtgggggaggcctgggttgcaggtttaagcgtgggacccacgtcagattggtggtgggtcatgcatgctggggtggctctcaggtcctccctgctggcttcccactcccaggggctttctcctcccagattccttagctgggtgaggggcaggacagagccctttcctagggaagcccggcaccccctgctgtccagggaaggggagtccttctagcccctgacagcttctctgcccctcccctggcctccccaggcctagccagggttgagttctcacccacctgtgccgccctgccttgttacctggaagcacagccttggggactgagcaggccctcactgtcactttaagaagggaatcagccactttgtgctcaccacctctggggaaggtgtgagaggagagaaggaagtggctgtttggctgctgacaacatgaagacttcctgcgatgagaacagaggcacaggtgccggccctgcagcccccagaacccggactggagggggccatggggcgccggaccctggccctgccctgggtgctgctgaccctgcgtgtcactgcaggtgagtgccggcaccagagaggggcaggggctgcagggagggtgatgtaggacgacagcccacccaccttgctgctgttccacagggaccccggaggtgtgagtacaagttcggatggaggccaccgagctctcgtccttcaccatccgttgtgggttcctggagtctggctccatctccctggtgactgtgagcagggggggccccgatggtgctggggggaccacgctggctgtgttgcacccggaacttggcatccagcaatgggcccctgctcgccaggcccgctgggaaacccagagcagcatctctctcatcctggaaggctctggggccagcagcccctgcgccaacaccaccttctgctgcaagtttgcgtccttccctgagggctcctgggaggcctgtgggagcctcccgcccagctcagacccaggtggggccggggtgaggggtccaggagggcagggaggggctcgggaactggccatccatctgattcttgcctctgtgcccagggctctctgtcccgccgactcctgcccccattctgcgggcagacctggccgggatcttgggggtctcaggagtccttctctttgactgtggctacctccttcatctgctgtgccgacagaagcaccggtgagacctgggccctgtccacgtccccctgacactgggctggccacatgccgtgcagagctctgaccatccttgctctctcccagccctgcccctaggctccagccatcccacaccagctcctaggcactgagagcacgagcatgggtgaggaggggggctgctttggggatgaggtggcaggggtagggggggccagggctgggcccaagctgtacagactcacttgatcctccttcccccgcgcaggcacccagccaggcctcccaggctgctctccacgtcccttatgccactatcaacaccagctgctgcccagctactttggacacagctcacccccgacagggggccgtcctggtgggcatcactccccacccacaccgcacactggccccagggccctgctgcctgggcctccacatccatccctgcacatggcagctttgtctctgttgagaatggactctacgcttaggctgggcagaggcctccctgcactggtcctggcctcactcttttccctgacccttggggcccagggccatggagggacccttaggagttcaatgagagagaccatgaggccactgggctttccccttcccaggcctcctgggtgccacccccttacgttattcttgggcctctaataagtgtcccacaggtgcctggccaggcccacctgctgcagatgtggtctgtgtgtgtgcatgtgtgggtgtgtgtgggcacaggtgtgagtgtgtgagcaacagtaccccattccagtcgtttcctgctgtgactaagtcagcaacacagttcctctgacatgggccttggctgtgcttctttgggggtgaagagattggggaggaagtctccacccctgggaggcagaagccaggtgagaaccagagtgggttggggcctccttgcagggctgggtttggcccagggagagggcagtgtcccagtcttagagatctgtcctggcttcttggggtggcggggggttgggggagcttcctgagggacacctgtggcttcctagacagaattgggggatcccagcgggatggtccctgctgcaatcccaccatgtcctaggacagcagcaagggttcctggggcttcagcctgagaaaagtccctgtgatttgacctggcgtccctctgccgggctccctgctgtggcctgggctagagtcctgatgccctccttccacagctggcatcaggcagggctggaaagtaggaggacttgcctgaaatctggctggatttcagagccttgctctgtcacccaggctggagtgcattggcacgatcttggcttacttcaacctccacctcccgggttctagtgattctcctgcgtcagcctcccgagtagctgggactacggatgtgcaccatcgtgtccgctaatttttgtattttttttttttttttcagtagagacgggtttcaccatgtttggctgggctggtctcgaactcctgacctcaggtgatccacccaccttggcctcccaaagtgctgagattacagacttgagccacggtgccccgcctgaataggagcttcttaatcaaaatttcagcatggctctgggtcaaaattgaccagctgatttaataagttgatgtaaaaattttacagtcagctacccctgggagggggagtctctccctagtcagtgaggcaccagatgccagagcattggcaatgtacaaggggctcagccctgtggctcatatgtgtaatcccagcacactgagaggatgccttgagcctgggagattgaggccagcctgggtaacagtgacaccacgtctctgcaaaaaagaaaattaggggagaactgtggtgcgtgcctatagtcccacctacaggcagagcgagaccatgtcccccactaaaaagaggccaagaatgcaggaaatatagataatatgggccctgtgatgggtggaggccaaatagatcaatacagaattgaagaagacacagagcacttgtatttcccttcaggcatagcgcgctggctaggactccagtaccgtgaagggaggcagtgagagcagacatctgtgcctcattcctgatctcaaggggaaagcaagaacaaggtgggtgccaaggaggggcaaggggctggggcaggcatagacgtggctggtgaggaaaggaggatagttgttgggggaaggtggggacatacaagcagcagttctcaaaatgggcagggtcctggccccctccctgcctctgctgaacactgcatcccatgcctctcccatggccacctgctgggctaacgggctggatttagactctgcccatgttggaatcatgccctcctccagggccggtgcctcccaaaacccccctctgagagagagccacagccccaggcttagccccaggccctgtcactgctgttgggggagggaggatgaaccatccgggaggcctcacaccattccagagcagaaatcctgacacaaaaggaatctcccatgggggttcagctgggtccagagcccggaaagtgacataaacacgcaccttgcatctaaggagaatgcacgtggcggtaccgggcctgaggcccctggggagtatgtaccctccagagctacccagaggctgttggctaaaagttctatgtggccccctccttgggcagcctggtaagcaggtgaccttctagctgggtcccatgggccacgggcaaggcaggaatggaacgaagagtcagtcctcagtggctgggtgttgtatcccatgcctataatcccagcactttgggaggctgaggtgggcagatcacttgaggccaggagtttgagaccagcctggccaacatggtgaaaccctgtctctactaaaaatataaaaattagctgggtgtggtggcacacacctgtaattcccagctacttggaaggctgaggcaggagaattacttgaacccaggaagcagaggttaccgtgagccaagatcacaccattgcactccagcctgggcaacacagcgagaatccatctcaaaaaaaaaaaacaaaaagtcctcaggcagggtgggccaccctcttgaggccttgcccaaacagccagggggtcccttgtcctcttttcggcccacctttgcaggtgggaccagttcagtccaaagccccggtgcctcagtttccctgtgggttgaacaaggagaatgaggtgtatagggcctggctcagacggaggggtttcctgagcatggggagcctgtttcctcagacctgtgaagggaaggagggtggatcggcctgactggccctgggaagcacagaggagcctactgggaccagggaagagactgacaagagaagggaggcctgtccctgcctgcttctgtctcaagaagattgttatcacttcctctggtgaaatcctgccttcctgtccccacggcccctcagctgatgccaccttactctggagaggatgggcagagcctcctatggagggagccctgtgggtcaccaaagctccagtgaccacccccgggcaaagacctgcagatcccctgttagagacgggcccaggactttgtgcggggtgcccactgttgctctgagccttcacttcctcagggaggcttcctcaggatctcgaacctgcggaaggaggaccagtctgtgtacttctgccaagtccagctggacatacagatcagggaggctgtcgtggcagtccatcaaggggacccacctcaccatcacccagggtgagtccagctgccctggcaccaaggaaccttcctggttcagccataggctcaggtgtgtggagggaatgacctgaggggctgtatgagggaacaacctcctggggctcccctatgcctgagttcctgcaactcagaagttgaggcccagagatccaggtagagggggctccagtcctgggactgccctgcaagtcatgtggcctgggacagggcttctccaagctctgtcccctcctgtgtagggcagggaggtcagaggggaccctgcagatccagtctcatgtctgggggtcaaggggtggcctcgagagggaccagtctctgtgtaggggaccgtcagccccctcaccccttgagcaagactgtggtccctgcaccaagggagcaggcctggggtgggaagaggccagctgggctgtggtggtgcctggggactgcatgggagcccctgccagggagggagagggacagaggacaagctgggggctctggtgcttgggctgggggctgagcgcctgtgacctccactggcttcctccttctcctctctgaggactgaatctggggtgcagcagagcacagactcaggcccgcctttcctctccctgaaagagcctgcgctggccttggacagagaaagggatgagaagtgaggctgagtgcggtggggtctgcagggatccaggtgggaggggcccagccagccaaggtgaggcccagcccctcagcaggaagatgggcactggggcccttgggcagggctgacttgacacttttgtgtgacttgagccactgtgcccagcctgaacaccctttcctggtaaaacactccacaaaccaggaagagaaggaatgtactgcaacaaaataaaggccagtcatgcaaggcccatggctgaaagtctttcagtcattttagatgaaagactgaaatctttgcctccaagatcaggaacaagagaaggatgcccgctctcactacttctattcaacacaggatttgaagtcaggccgggcacagtggctcacgcctgtaatcccagcacttttggaggctgaggcgggcagattacttgagcctatgagtgtgagaccaccctggccaacatggcaaaaccccatctctactaaaaaaaaaaaaaaaaaaaggatttgaagtcctggccggagcaattaggcaagggataaaaaggcacctaaggcccttttgcaataagaagccagatggataaaggaagtgctggtcaccctggaggtgtactggtttggggaaggtccccggcccccacagccctctggggagcctcaccctggctctccccactcacctcagccctcaggcagcccctccacagggcccctctcctgcctggacagctctgctggtctccccgtcccctggagaagaacaaggccatgggtcggcccctgctgctgcccctgctgctcctgctgcagccgccagcatttctgcagcctggtgagtacccaggaccgcccaggtatggtctctgcccaaaccacaggaggggccaacccaagacaaaggcagaacatctggggcaggggccaggctcccacctccagcaaacaagggcgggtcccataggggtgggtgccgccatctcttccccctccaccctcccccatgcctgaagagtgggagacccaggccagaggtcagtccagccacctgtcacacgactgcctgtgggtgaaggtgtgggagggtctggggtcaccctctttgtgtcctgaggtggtttcaaggtctctcccccactcactccctccttcctctaggtggctccacaggatctggtccaagctacctttatggggtcactcaaccaaaacacctctcagcctccatgggtggctctgtggaaatccccttctccttctattacccctgggagttagccatagttcccaacgtgagaatatcctggagacggggccacttccacgggcagtccttctacagcacaaggccgccttccattcacaaggattatgtgaaccggctctttctgaactggacagagggtcaggagagcggcttcctcaggatctcaaacctgcggaaggaggaccagtctgtgtatttctgccgagtcgagctggacacccggagatcagggaggcagcagttgcagtccatcaaggggaccaaactcaccatcacccagggtgagtccagctgccctgacacctgccttgcccaccgcagtgagggttttggtgaccactgatgtcttcacatttaaacccagtggtctggattgagagctgttagcatttcaccttgctaccccttccatgtctgggcttctgagagcagcttgctcatcctgaatgtccccaatctagaaagcagcacaccatgcctttcatccagacgccccacacccccagaagagggtctgctcattcctcatctcttccagctgtcacaaccaccaccacctggaggcccagcagcacaaccaccatagccggcctcagggtcacagaaagcaaagggcactcagaatcatggcacctaagtctggacactgccatcagggttgcattggctgtcgctgtgctcaaaactgtcattttgggactgctgtgcctcctcctcctgtggtggaggagaaggaaaggtaagtgcccagaacgcactgtctcctcaagcttcccagctgggggtttctctgagcccacctgcagctaagggacttcagaaatatgcagaccctgctggctcccctcaagcccaccaaggccgactctggcctgtgctggggcgtctgcatctcgggggcctcctgcagtggggtggtgcagggtcacatgtgagaacccccagcctgggcgcggtggctcatgcctgtaatcccagcactttgggagcccaaggcaggtggatcacaaggccaagagatcaagaccatcctggccaacatggtgacaccccatgtctactaaaaatacaaaaattagctgggcatggtggcacacgcttatagtcccagctactcaggaggctgaggcaggagaatcgcttgaacccgggaggcagaggttgcagtgagtcaaggtcgtgccactgcactccagcctggtgacagaacaagactctgtctcaaacaaacaaacaaacaaacaaaaaaagcccccagccctctccacacagctggatccccccaacttctctctcagtcatcaatcatccacgctcccctgaaggttcctggggaggggagggcctgccctgggaaaagaacagagagaggagaagggaccagaattgggctgagctcagcaggcactggctgactgccctcctgccacggcctggcttgaaactggagaagcaaagtatataaagcataggctctgctctcagggaactgggggtgtggagttgtcagttgcctcaaggactaattgcttcattgagaaagaactatggtattgctaaacaagggtgggaggagagagaggtaatcagggaggacttcccacaggaggtggcatctgcagatgtctcaaaaaagaaaagaattagcctggcaagaggtgaggattgtgtagaggtcactcactttccttgtgggtggaggaaaccattccaggagctgtaggaagcttggtgctggtgaaggaggcaggagaggagagaagaggagatgaccttagaaatcacatccaagagcctctgatcccagaggcagcgtgaggcagcaaagggtgacctcagttccccatgagagacctcagtctatggaggaatggccagaggtgggccaggctgggtcagtgcagtgcaggagtgaggtggagagagggaaagggccagatcctagaaaagattaagtaataaaaaccaatgagattgttagattgatgtaggggcaagggagcaggaagaagcacccgtttccacttgggtgcatggggctatgatgaaaccaccaactacagtagacaatagaggaggagactatgtttggaggggagcgatgcctcgtttagttcggaatttgtttttttgttttgttttgttttttgtttttgagacagagttttgttctgtcgcccaggctggagtgcagtggcacaatctcggctcactgcaagctccccctcctgggttcaagccattctcctgcctcagcctcctgagtagctgggactacaggcgcccgccaccacacctggctaattttttgtagttttagtagagacggggtttcactctgttagccaggatggtctcgatctcctgacctcgtgatccgcctgcctcggccttccaaagtgctgggattacaggcttgagccaccgcacccggccagtttggaatctgttatacgggagatccatgtgtggcatctcagcagagttgtccattggaaacttggatgtacacatttccagttcaaaagagaggacaaggctccaggcagcaatgagttctacctcaatatcctccaaacctgacagtaagttaccatcaagaaagtcttcaggccaggcacggtggctaatgcctataatcccagcaccttgggaggccaaggcggctggatcacctgaggtcaggcgttcaagaccagcctggccaaaatggtgaaaccccatctcaattaaaaacacaaaaaattagccaggcatggtggccgacacctgtagtccaagctactcaggaagctgaggcaggagaattgcttgaacccaggaggtggaggctgcagtgagccgagatggtgacactgcactccagcctggctgatagagcgagactccatctataaaaagtaaaaaagaaagtcttcagtgaaaggagattcgccctatcagctatgaaagcacagaggggaggaacatggagtaggggctgcctgcagtcagatcctgccctcacaaccttgccagggaaacaggctcgtgggtacaaaggttgtgtgcctcaacttcctcatggaagcacgtgagattattttataaccatagagtggagacagtcagtatgaccaccaaacccaggagccatatattaaaatactgataaatttaactatataaaaaaatttttgccgggtgcggtggctcacacctgtgattctagcagaaaatcagatcaggagatcacagaaggtcaaggaactactgagagagcaggaatggagagcaggggggtcagcaggaagcttggagaatctgcaaaatagtagattacaaaggatcaaaagtcagtgaggttcaacaagaggtagggtgggataatgaccaaagacagagggaacacttccaggttcattctgtgaggtcagcaacaccatgacctaaaagccagataaagaccctgcaagaaaaacaatacacaaaatacagatgaaaaggctggtgaatattgatgggaaaatcttcaacaaaattctagcaaaccaactttcacagcatgttaaaaggactgtacgccatgaccaagttggagatagccctggaatgcatgtatcacccaaaacaggaaaattaatgtagtgcaccccattagcagaatgaaggacaaaacccacatgatcatctcaactgatacagaaaaaacattggacaagattgaacacctttccttttttttttttgagatggagcctcgctctgttgcccagcctggagtgcagtggtgccatcttggctcactgcaacttctgcctcccgggttcaagcgattcttccacctcatcctttcgaggagctaggattacaggtgtgcaccactatgcccggctaatttttgtatttttggaagaaacgtggttttactatattggccaggctggtctcgaactcccgacctcaagtgatccgcccaccttggcctcccaaagtgctggcattgcaggctgagccacggtgcccagcctgaacaccctttcctggtaaaacactccaaaaccaggaaaagaaggaatgtacagcaacaaaataaaggccagtcatgcaaggcccatggctgaaagtctttcagtcattttaggtgaaagactgaaatctttgcctccaagatcaggaataagagaaggatgcccgatctcactacttctattcaacacaggatttgaagtcaggctggtcacagtggctcacacctgtaatcccagcacttttggaagtcgaggcaggtggattacatgaggctatgagtttgagaccaccctggccaacatggcaaaaccccatctctacttaaaaaaaaaaaaaaaaaaaaaagatttgaagtcctagccagagcaattaggcaattaggcaagggataaaaaggcatctaatttgaaaaggaacaagcaaaatgatctctgtttgcaggtgacaagatctcatatgtagaaaatcctaagtattgcacaaaattacctgttgaatgaatgaattcagcaaagttccaggaaaccaatttaacatgcaagcaaaaatgtattacatttctgtgcactaaacataaacaatctgaaaagaaaattaagaaaacaattccatttacaataatgtcaaaaaataaagtaagatctttaggaataaacctaaccagggaggtgaaagacttgtacactgaaactacaaaacattgctgaacaaatgaaagaagacacaaataggtggatgacattcttgttcgtggagtggaaagattaatattgtcaaggtgtccatgccaccaacaacaatctccagatccaatgcaaatcctatgaaaaccccaatggcattgtttttgctcaaacaaaaaattcatcctgaaattcaaatggaatctgaaagcactaccacaaaccaaaataatctttagaaacgtgaacagagaggacacgcattccctgatttcaaaatgtattaaaaactatggtaatcaaaacgatgtggtactgaaataaagacataaataggccaggtgcagtggctcagcctgtaatcccagcactttgggaggctgagctgggtggatcacctgagattaggagttcgagaccagcctgaccaacatggagaaaccccatctctactaaaaatacaaaattagccaggcgtggtggcgcatgtctgtaatcccagctaatcgggaggctgaggcaggagaatcacttgaacccgggaggcagaggttgcagtcagccaagatcacgccattgcattccagcctgggcaacaagagtgaaactccatctcaaaaaaaaaaaaaaagacataaatagagcagtggaatagaatacagagcccacaaataaaccctcacatagatagtcaaatgatcctcaacaagggtgccaagatgaccactcgacgaagaatagtttcttcaacaaatggtgttgagaaagctgggtactcacatgcaaaacataaaggtgcatctctgccaaaaaattaactcaaaatggattaaagacttcaatgtaagacccaaaactgtccagtgtctagaagaaaatacaggagaaaacatagggtgatgagacaagatggtgggtccttgcaccatcatccccagacccatggtttttattccacaggggaaggatggtttgtattctacaggtgaagtatgatcacatcaaggttgtttgactccagggcaggatttatgatacgtacctgctcttacacaagaacgatagatcaactggaaatcttagaggccttcccagaactggggttaatcagaagctgccatggcagattagcttccaagatggagttgccttagcctccacaatattaaaagtagaactaccatatgatccaacaatctcacttctgggcatctatccaaccaattgaaagcagggtcaggaagaggtgtttgcacaccgatgtttgtagtagcattactcaaaataccccaaacgtagaatcaactgaaatgtccatcaaacaaaatacggtgtctgtagtccaagctactcgggaagctgaggttaggagaatgacctgagcccaggaggttgagggtgtagtgaactatgattgtgccactgcactccatcctgggtgacagtataagatcctgtctattaaaaaaaaaaagttctgaaaaaaataatattattgaatcttttttatttagttatttattttgagacaaagtcctgctttgtcacccaggctggagtgcagcagtgcaatctcagttcactgcaacctccgcctcctgggttcaagggattctcttggctcagcctcccgagtagctgggatcacaggtgtgtgccaccacacccagctacttcttgcatttttagtagagacggggtttcaccatgttggccaggctggtctcgaactcctgacctcaggggatccacccacctcggccttccaaagtgctaggattataggcgtgagccactatgcttggcctcaacctttaaagggaaggaaattcttacacatgctgtagtataaatgagccttgaggacattatgctaagtgaaataagctagtcacaaaaagataaatactgtctgattccacttacatggtatctagagtagccagattcctagaaacaggaagcagaaaggtggttgtcaggggcacagaggagatgagaatggagagttaatatttaaagaacatagaatttcagttttactggcccagtgtggtggctcacgcctgtgaggaacatgccttggaaggctgaggtaggtggatcacttgaggcctggagttcgagcccagcctggccaacatggcgaaaccctgtctctactaaaaatacaaaaaataagctggtgtggcgggggcacctgtaatcccatctgctcgggaacctaaggcaggagaatcactggaacccaggagatggaggttgcagtgagctgagatcacgtcactgtatagcagcctgggtgacacagcaagactctgtctcaaaaaaagaacttttgggtttcagtttcgcaagatgaaaatgttctggagatctgtctcacaaccatgtgaatacacttaacactgccaaactgtacactaagcaatggttaggatggtaaattctaggtggtttttttttttttttttttttttagacagagtctcgctttgtcacccaggctggagtgcagtggtgcgatcttggctcactacaacctccacctcccagggtcaagcaattcttctgcatcagcctcctgagtagctgggagtacaggcacatgccaccacgcccggctaatttttgtaattttagtagagacaggttttcaccatattgttcaggctgatctcgaactcctgacctcaggtgatctgcccaccttggcctcccaatcctgggattatcaccgcgtgagccaccgcacccaccttaggtgttaggctggaaggagtgaaagttgcaatatgaaaatgatactagcagttaatatttcagagttcccagtcccaacattaaaaaacaaaaaacctgtagaagtggaaggggaggtccctggagttgaggggtgccgtgaggcctgggttcagagggtgtctctgtggacgtggagccctcccaggagggggctggatggtggaggggatgtctgtggaccaggagcccagtgcttgggaaacactgcaaggatgccagggggacaagaggggcagggcacagtgggagaggcagcagaggattcagggtgagaccagccagaggggaggggaggcctagaggtggcaacagaacttgaacagccacaaacatgagtcccaagcatgaggctcccaaggctggagggcagacacagccgccacccagaaggaaaccacaggcgcggtctccctgaggacctggagggagaggtgggggtgcctatgtcaagggaaggggagggaaggaagagatgggtgggcgagggctcagcgatagagggagccaggttggggctgagcagagagctcaagagcgaaggaagccaacagagggtagcaaggttttgcgggggcggtttcaggagatgacgtggtggacaacagggagaacaggtcgggggggagcctcagggtgccagctgagtcccaggcccttcctgatgggtttgggcagagctgatctgctgctctggtccctctaaggagggcctcagcctagggcgcagcagagaaggtgggatggagactgctatcacctggatgccaccctgactcactgttggtccccctacacgtcagcagcggactaaagccacaaccccagccagctgagtgctgggcctccccaagggagtggggagtacaggtgcgggcaggggacgggtttggaaatcagggactgtgctgctaagaaccccacaagcccagcctgccacaaattctcctgagtttttgccacctcccacttaaatctgatctctgaagcaactgcctcgcctgcctcactaataatcctggccctgcatctaaaaacacttcccctcctgcaggtagcagggcgccaagcagtgacttctgaccaacagagtgtggggagaagggatgtgtattagccccggaggacgtgatgtgagacccgcttgtgagtcctccacactcgttccccattggcaagatacatggagagcaccctgaggacctttaaaaggcaaagccgcaaggcagaaggaggctgggtccctgaatcaccgactggaggagagttacctacaagagccttcatccaggagcatccacactgcaatgatataggaatgaggtctgaactccactgaattaaaccactggcatttgggggctgtttattatagcagtgcaaagagttcctttatcctccccaaggatggaaaaatacaatttattttgcttaccatacaccccttttctcctcgtccacattttccaatctgtatggtggctgtcttctatggcagaaggttttggggaataaatagcgtgaaatgctgctgaca

SEQ ID NO: 814 - DNA, 853 bp, Homo sapiens
ctcaagcaatcctccagcctcagtctcccaaatagctgcaattacaggcgtgagccaccatgcctggctgagagggaatcgttaagaaggagtgggcaggggcaagaacactgtcagagacagtgtgttggccacggctactacagcaaattggctgcttcctgtgatcgcacgggttgagggctcagttccacaaggctgccccagcatcagatgccagtcgcaagctcacgtggtgcctgtgcttctgacacagggctataaaaattgaggttcccatgatcccctccttgggttcaattaattttctagaatggtacctagaactcagggaagccctttacttacatgtgtccccttataaaggatattatagggcctggcgccatggctcatgcctgtaatctctgtgcttcaggaggttgaggggggaggttcacttgagcacaggagtttgagaccaacctgggcaacatagcgagaccccgtctcaaaataaagatataggatattacaaaggatagttatgaacagccagatataagagatacacagagggaggcctgggggaaggggtgcaaagcttccgtgtcttctctaggcactgcaccctctaggaagctccatgagttcagttatccagaagccctctgcatcccttttgggtttttatgggcttcattataaaggcatgattgggccaggcacagtggctcatgactgtaatcccagcacattttgaggctgaggtgggagaatcaattgagccctcaggtggcaactgaggctgcagtgagttgtgattgcaccactgtactccagcctgggtgacagagagagagcctgtctcaaa

SEQ ID NO: 815 - DNA, 21676 bp, Homo sapiens
agattctgtctcgaaacaaaaaaaaaaagagggcctcagagagccagggaccagggaacgatatgacgcagtgttctgaggacagagagagggaagaatggggaggggaaggagtggcacatggggttgagcagaggagaaagtcagaaaggtggcttggagaagccagcagtctgagaggctggggaggatggagagtggtttggggtttggggtcggggtctaacgtgatcagttgcagaagcattacacggtggcctggtttctttactcagcccctggggtagatcccagccccccgcgtaggtcccttggctgcaaaaggaagagggagtgtttggatgaatctgatgatgagccagagaaggagctcgcccctgagcctgaggagacctgggtggcggagacgctgtgtggcctcaagatgaaggcgaagcgacggcgagtgtcgctcgtgctccctgagtactacgaggccttcaacaggctgcttggtaggaggacaccccagagagcacctccaatcctgttctttctaaaaagaggaaacttccaataaccacacttttccaatgggaaaaatatgccccagtgggtgagctctccatgcgggaggactctgaagtgatcactcatgagggaacttaggagtcaacagaggattaggtagacttgataaaggtcggtgcttgggataagaaagcttggttttgggccaggcgctgtggctcccgcctgagatcccagcacgttgggaggctgaggcaagagaattgcttgaactcaggactttgaggctgcagtgagctatgactgcaccactgcactccagcctgggtgacagagcaaaactctgcgtcaaaagaaaaaccaaggctgggcacagtagctcatgcctgtagttccagctactcgggaggctgagacaggagaattgcttaaacccaggaggcagaggttgcagtgagccaagatcaggccaatgcattccagcctggcccacagagcaagactctgtctcaaaataaattaataaataaataaaaataaaaatcaaacaaagaaaaacaaaatcaaaaatcaaaaaagtggtttcagctgtgccctctgaaacttaatgtttcttactgacttttctaaacctaagtgtctccatccatagtgggggataccaaggccatggtcacaccctgatgtgtgactgtctcatgaggaaatgatgggaattcctttatgactctgcagtggtccctccgtgtctgctggagggggtcccggctgattcccagctctacatcctgtagattctcacacccagggcctccttcggcctcttctcaggggagtctcagagcaggagcctctctcccttgcccagtgaaagtcattctcccctctcccatccacctcacccgcggccacaatcctgagactttcccccgggaggcacacttctcctcactgccctgctgctcccatggaaaccctgtcctgcttctcacgctgacatctgctctctaatcacagaggatcctgtcattaaaagattcctggcctgggacaaagatctgagggtgtcagacaaggtaaggttgttctctatgtaactgtgttcctgttctaacgcacggccagggggagggcgcagcttccaaacccacagttctccctccaccacctcccaccagatgctcctacagttttttttgtttttgtttttgtttttttttgtgagacacagtcttgctctgttgcccaggctggagggcagtgtctcgatcttgactcactgcagctgatgcctcctgggttcaagcgattctcctgcctcagcctccaagcagctgggattacaaacgtgaaccaccacgcctggctaatttttgtgtttttagtagagacggggttttgccatgttggccagattggtcccgaacacctgacctcaggtgatccacccgccttggcctcccaaagtgctgagattacagacgtcagcactgtgtccgaccagctcccatggtcttgagtcttggcacccacacatttttttttctgagacagagtccagctctgctccccaggatggagtacagtggcatgatcatagctcactctaattcctgggctcaagcaatcctctttccttagcctcctgaggagctgggactaggcacatgccaccatgctcaacgaatttttgaaatcttcgtagaaacagggtctcgctgtgttgcccaggttgttctccaactgttgggctcatgtgatcctcctgtctccacctctcaaaaagtactgggatcacaggcttgagccgccactcccggctattctttgtctttttatgatttgtcagcatctccctcaggactctgctggtctcttgcagagtgaatgagtggcccctgcctctcccatgggtcctttgggatctgagccctaggccaccgtctggctgcagtcctgaagctcctgggccctctactctcagctccttgggacagttctctgcctggcacacaaaagaccctcctgacaccagccgacctagacacaccccctccaaagatcccatcggagcccaccatcctgggagcatcacctaaaacccttcctccggcttctcggatttgcatccgaccttcgaatacccctccaccccgcaatttccacatgagcacagtcaccccaatgctgaggtcccttctctgatgggcaacccctccccagacccccattccactatctccacaatcttcctctcccaagatgtgacctctccctctctgtgttcctttctctccatcagtatctcctggctatggtcatagcgtatttcagccgggccggcctcccctcctggcaataccaacgcattcatttcttcctggctctgtgagtggtttgctgcctcctatccatcaatatccaacgccctgggacagcgggggaagtgggattccagcctttcatttattctttcacctatttgtcctctttactctgtgtacaaaaaagacaggattatagtatcttagactgttgtctctaaaaagaaactcaggctgggcatggtggctcaggcctgtaatcccagcactttgggaggccgaggcaagcggatcacctgaggtcaggagtttgagaccagcctggccaacatggcaaaccccgtctctactaaaaatagaaaaatcagtcgggcatgttggtgtgcacctgttatccaagctacttgggaggctgaggcatgagaaccccttgaacccaggaggtggaggttgcagtaagctaaggttgagccactgcactccagcctgggcaacagagtgagactttttctaaaaacaaaagagccaaaaaaaaaaaaacaggcaaaaaaaccaaactccaatgccagtgtacaaataaaagagtaaaacaggccaggtgcggtggctcacgcctgtaatctcaacagtttgggaggccgaggtgggcagatcacaaggtcaggagagcaaaaccatcctggctaacatggtgaaaccctgtctccacttaaaaaaaaaaaaaaatacaaaaaattagccaggtgtggtggcgggcacctgtagtcccagctactcgggaggctgagggaggagaatggcgtgaacctgggaggcggagcttgcagtgagccgagattgcaccactgcactccagcctgggcgacagaatgagactccgtctcaaaaaaaaaaaaaaaaaaaaagaacaaaaaacaaaaggaaccatgaaccgctcctaaggggagaacaaaaggagcggaggagcggacatgacacttcccccagcaagcagacgtttccggttcttctctctctctccttcccacatcaaccgcaaaagccaccaacctcctctgggttcccgtgacagaggtcacagtccaggtcccccttgcatcacttgaatccactgtcaaatgctccctgctggggtctcctggagtctctccccaagccaaggggcttcctagtgcagcctgaacatctttccaaagcacgacaacctcactgcccacctgaacaacttccttagctgatgtctttctctatcgaggccagggtccacagtgccaattccaccctctctacaatctctacaaccacactggctcgccatcttggtgtttcctggcttggcttcactgctccttccaaatgccctccacttgactttgcattcgtgttttctgtctgggtgtcccacacacatgtggttctgaagggaagcacccattccttgaagtcggttcaccccacagcctctgtgatgccttccctcatcttccaacttctgcatgcccgtagctctccagttacatcctcttataatgtgacattgggattaggtcatctcccctgattactcccagtcccattagactagatgcctgtagaaggcagggtcctggcaaaatatcaatgtattcaattgctttttttttttttttgagacagacttgccctgtcccctaagctggagtgcagtggtgagatcatagctcaccgcagcctccatatcctgggctcaagcgatcctcccacctcagcctcttgattagctccgactacagggctgtgccaccacacctggacagttatttatttatttatttatttatttatttatttatttatcaagacaagagtgttgctgtgtctctcaggctggaatggaggggcccaatcttggctcactgcaacctccgcctcctgggttcacacaattcttatgcttcagcctcttgagtagctaggactaatgggtgtgccaccgcaccaggctgatttttgtatttttagcataaatggggtttctctgtgttggccaggctggtctcaaactcctggtctcaagcaatccacctgcttcagccttccaaagtgctgggattacaggcatgagccaccacgtctggcgtattttttatatttttaatagagacaagggtcttgctatgttgcccaggcctgtctcaaactcctggcctcaagtgatcctcctgcttcggcctcccagtgtgctgggattccaggcctaagccaccactcttggtcaccagttgggtttttgtctccatcctgaaggagtgggagatgcccttgatcaggtctctgtccagcagagccctcctgaggaaggcgtggctctctgcagggtgggtgccagtcctgagctagggacggtcccttaccttcctctctgggaagctgacctcagccggaggtctctcctggtggtgcccctgagcagcaacctgatttctgtcctcagctatctggccaatgacatggaggaggacgacgaggcccccaaacaaaagatcttctacttcctgtacgggaagacccactctcacatacccttgcgccctaagcattggttccagttatgccgtcccatgaacccgagggccaggaagaactgctctcagatagccttgttccagaagcgtcggttccagttcttctgttccatgcgctgcagggcttgggtttccccggaggagttggaggaggtgggtggggcctggggaggtggaggatgtggggaggaatcgggtgggctggaggctggacgaggggagagaggggtatcctggggagtccccgtcttctcaaagcgcatttgtttttccagatccaggcttatgacccagagcactgggtgtgggcgcgagatcgcgcccacctttcctagagctccagggaccgtggaggcctgaggtcatcggcctgagagaaggtacatctgcatcctccggggtaaaggcagaatattggggtctatttcggaaatccaaggaacccaattgcttgatctggcttcaagcctcggcaacgtggcgagatatcccctctccacaaaaatacaaaaattagccaggcgatgtgggaggcatctctactcccaactactcaagaggctgaggcaggaggatcgctggagcctgggaggtcggggctgcagggagccctgatcctgccactgcactccagccggggcgacagagtgagaccctgcctcaaaaataatcataaatactgagttcggggaggttctttatgattgatgcacttgagttaccgatttgggtcgagggttcagtgaagctttggtttacatcttgtgcagctaaccatgttgagcacagagcatgagacttcgtcatgaggaggtaggattatggattaggcttctggactcgtggtttgtgatgttgtcacattagaaacagatctagcacagttacaagtttagatctgaagtgacacaaaagaccctagctgtgatgaagtccaaagccacattctctgagggtgccctactccctgggaagacccacccaaagtcctcgctatgaagcagatcactggggctgaccttgggtgtattaagttttggagtcagggtcaccaaagcgtgagtttcacagttgaacacgatggttcagaagcagggtatagaatgaaaggcaggagataaaatcgcacttctcaattgctctgaactctagctagacttgacatgggacgtgaataaccttcctgtctagagagctgtctccttgaggtgtgacattgtctctctcacttccagaacaccggacccaggggagatgtggattttcagcaggaactttattccagtgctaatggcagacatcaggaaggaggagaggagccatttgtgcagatcatctagaagaacctggaccattcttgacagagctgaatacagtgatcacgttgtcctccaaggagcaggggtggggtggggtacttctaggagtccttggagaaaagtaagaaaccaggagtgtttccagttccaccctttcctgcggcaccacctccctttttatattgctgaatgccaacctccctggggcggaacctggaggtcctgtttcttacggacttggttgccacagtccaggagcatttgaaggcacagtgcaggggctcagattggcacagaattctttgtgaaatatgagtgccacagactgtaacagatagcttcatgcacactatgcattttattggtttgtttggaaaatgttggccattgaatcattaataggtttatttcaaatagtttggaaattgttgtacttttgaaaacatgctgttcctgtagagttttttgatgagagttatagttgttatatatacataaagataattttcttttcatttttaagtgagaattctttttatcctaaatcttttattatctttaaatttttctctgtattattatatgtgctcctgaagcgagcactctttttatctatgatacttccataataatctcttctatttatagctattggtagttcccccaaattctggtcatagaaatttttatttgctgtttaggtttgtgactgaattgtgagaattcagttgtgatttttaacatgtcttagatatatatactaacatgtctaatatatactatctattttattgatttatttcgaaaaagatgggcaaagaattatttaaatattattttatttatttaaatatttattaaatatatttatttatttaaatatttattaaatatatttatttatttaaatgttattactttaaatattattttaaatattttggaaatactggtatttttgaatagatgctgtttctataaagctgtgtgatgggtattataactgttatatacacataaatataattttgttttcctttttaagagaggattctttttatcctaaatcttttacctttcaatctttgtatctattactacatatgctgctgaagggagcagactttttatctatgatacttagttaatgtatatattacatttatagctatgtggtagttcccctaaattcttgtaaaaataaatttttatttgatatttagtgtatgtttgaaatgtgagaattcagatggaattttttatcttgttttggcatgtttgtatgttactttaaagaggatgtgtgttctaaaggaggacatgagctgtgtgttttcaagagaacagtgcagtgcatctcttggggaaacataataaagatgaacttttctcaccttcacagtgagtgtgatcatattgtggtctggattgattatttgctgtcaagtgacatttttccttaatggggttgtggttatttgaacatatttattagctctggaagataatcctgtgttgttttttatgtagaaaaaaacataaggctgggtgcagtgctcacacctacaatcccagcagttttggaggtcatggcgggaggatcacttgaagcctatttttaatttttattttttaaagaaaaacaatagaagagaaggctgatcccaagctacagggtttttttgtttgtttgtttgtttttttcagacggagtttcactctgtcacccaggctggagtgcagtggcatgatctcggctcactgccacctctgcctcctgggttcaaggaattctcctgcctcagcctcccaagtagctgggactacaggcacccgcctgtacgtctgactaacttttgtaaaaatagtagagacaaggtttcaccatgttggccaggctggtctcaaactcctgacctcaagtgatccacccgcctcagtctcccaaagtgctgggattataggcatgagctactgcgcccagaccccaggctagagttttaaagcaggaaatgagagaaagatattgagagaggaaaaccaggtggtaagaaaactctaaaggtggctgggcgtggtggctcacgcctgtgatcccagcaggagttcgagaccaggcaggagaatcaccagcagagaatatgtctccccaacccctctcaaaaaaaaaaaaaaaaaaaagggccaggcgcggtggctcaggactgtaatcccagcactttgggaggctgaggcgggcggatcacaaggtcaggagatcaagaccatcctggctaatatggtgaaaccccatctctgctaaaaatacaaaaaattagctgggcgcggtggcaggcgcctatagtcccagctactccggaggctgaggcaggagaatggtgtgaacccaggaggtggagcctgcagtgagctgagatcgcgccactgcactccagcctgggtgacagagcgagactccatcacaaaaaaaaaaagaaaaaaaagaaaaaaagaaagttcctgcaacagttcaagctgtgaaagacaggcgctctgccatgcaattctttgtgatttttcttttttatttttggagtcggggtcttgtgctgtcacccagactggggtgcagtggtgcggtcacagctcactgcgggctcagactgaagctcaagcgatcttcttatcttgcctttctaattgctgggattataagcatgagccactgcacctggcctgtgtgacgtaattctgatgtcaactccctgatgttacatcaaatgctacaggttaaggccaccagcccccgctaggctgccctcgcttcagatgcagctgcaagcttgggtgtccacagactgcatgtacttctcaccaactggctgcaaatttggaggttcccaccacgtcctcaggtttgataattcactataacaacccacagaactctgaaaagcatgatactttctctttctttatttgagacagagtcttgctctgtcgcccaggctggagtgcagcggccaccatgcttggctaattttagtatttgtattagagacagggtttcgccatgttggccaggctggtcttgaactcctgacctcaggtgatccgcccaccttggcctcccaaagtgctgggattacaggcatagccaccgtgcctggctgacttctagagtttcaataacagagatgtggttcaagaagaaaagggagacatgttttgtagacagcaggagcttcatgaaaagaagccaatgaagggcaggatgtgtagctgtctacctacaggaaaccagccaggagcctccccgcagggagttcagcacagacggccgggaaaatctgcattaacctgagctctggacctaagagaggacaaggccttgactgtttctacagactcacaagacgcaatctctgcggtccatgcccgtggtgtgatctgggaaacagggggccttctaaatgccaacaacaaggaaatcaaatgcgcaacagacagaaataccggcattgacgcgggccatggagaggcctaaacagatgactgcagtccactgccaaggtcatcaaaggggtgactctgaaataagaaatttcagacgccacggcccaaatagctgcacgaggtggggaagtcctccacatgcctctgcttccttcagtacctcttcatgaaataagcggaggtacttccctggggaatttcctttctctttctttctttcgagacagagtcttgctctgtcgcccaggctagagtgcagtggcgcgatctcggctcactgcaacctctccctcccgggttttggcaattcttctgtctcagacttctgagtagctgagattacaggtgtgtgccaccatgcccagctaatatttgtatttttactcgagacagggtttcaccatctaggccaggctggtcttgaactcctgacctcatgatccacccgtcttggcctcccaaagtcctgggattacaggcacgagccaccgcacccagacttctttattttttgagatgaagtttcgctcttgttgcccaggctggagtgcaatggcgagatctcagctcactgccacctccacctcccaggttcaagtgattatcctgcctcagcctcccgagtagctgggattacaggcacccaacaccaaacccagctaactttttgtatttttagtagagatggaatgtcaccatgttggccaggatggtcttgaacccctgacctctaatgatctacccgaattggtctcccaaaatgctgggattacaggcgtgagccactgtgcccagcccctcccatacctcttttggccaaggcagtacaattcagagaatcttgccagggaagactggtaaatggacgtcaacatgatgcctatggctcctggtggatttagatacctcctggtgcttactgatacctttaccagttacatgggggcttttccatgccagactgaaaatgcaggagatcactgatcaaccttcaactatttactagcagaacactgaggggactctgcagtcaccaatatctcctattgcacttggataaacacctcccgggaaatagagatgaatagaaaggaaatagtcaaacaagcagaatggctacattccttcaaccagaagggtccattagtctgttttcacactgctataaagaactactggaaactggggaatttatgaagaaaacaggtttaattgactcacagttctgcaggctgtacaggaagcatggctggggaggcctcaggaaactgacaatcacggcagaaggcgaaggggaagcaggcacgtttctggccatggtggagcaggagagacagagagagtgaagcgggaggtggtgcatgcttctaaacaaccagatcccatgagcgctcactcactatcatgagaacagcaagggggacgtcagccgccatgagccaatcacctcctaccaggtccctccctcaacactgggaattgcaatttgacatgagatttgggtggggatacggagctgaaccatatcaagggtagtacaaccactgagattgattgactgagatggagtcccgctctgttacctaggctggagtgcagtggcacaatctcggctcactgcaacctccgcctcccaggttcaagcaattctcctgcctcagcctccctagtagctgggactacagcacacgccaccacacctggctaatttttgtattttcagtagagacggggtttcaccatgtttgccaggctggtcttgaactcctgacctcgtgatcaccctgcctcggctcttcttttgctggaattacaggcgtgagccaccgcacctggccaaccactgagatttagaaggcagtcgagtccactataccacacctcacctggtttcttcctctgttggggcgcctcgtggccactgttctgttactttttggtcctatttatttaaatggatggtgagctgtttgtcctccaggatccaacacttccaccttcagcttgtattacaacaataccagcctttcaagctactccaggtgaccccagaactcatttgaactcagaagcccaagagtttcattcctctcactttaggggactaagtgcccctagtcagcatgaagtcgatacagaagcatgacctccatccctaatccctcaagaatgaggagtggaaggtgtcggcaggagggtgggacgcggtttgtaaatctgtaactgcatcagaccaaatctagttcaactttttttttttttttttttgatggagtttcgctcttgtcacccaggctggagtgcaatggcacgatctcagctcactgcaacctccacgtcctaggttcaagcattctgctgcctcagcctctggggtagctgggattacaagggtgcgccaccacgcctggctaatatttatatttttagtagagacggggtttcaccattttggccaggctggtcttgaactcctcgacctcaggtgatccacctgccttggcctcccaaagtgctgggattacaggcgtgagtcaccgcacccgaatcagttcaacttttatgtaatgaagttgtcagttgtttttcaattgccatcgacccgcaggttgaaggtcatgtaccctgtgcatgcccaggttaaccaagcgtgccaccgtggagtggaacctaagagctcagcctgaagagctcggaccgatttaagaaccagacaccccaaggcaggagccaggatccaatcagattgagttttggcgtcaccccatggcaggatccagtcagatcacatctcccagcattactttattgcaagatccaatcaaatcacacctcattaccctacgcttataaaacctgacatagccccgagctgtgtaagggagatttgagtacttcctcctgtgttcttgctggctgacttacaaaaaagctttaaaaaaaaagccgggcgtggtggctcacgcctgtaatcccagcactttgggaggctgaggtgggcagatcacttgaggtcaggggtgcaagaccagcctggccaacatggtgaaaccccatctctactaaaaatacaaaaattagctgggtgtggtgacacacacctataatcccagctactcgggaggctgaggtaggagaatcacttgaacccaggaggcggaggttgcagtgagccaagatcacaccactgcactccagcctgggcgacagagtgagaagactccgtctaaaaaaaaaaagttaaaattagcaccgaatgctttacaagtaaaaaaagtttttagctgcatatgtttaagtaactttttagattataagaaatatgcatgcaaaatggaaaggcacaaagaagagagcaaaaagtgcatgagatctcacatccaaggataaccgctgagaacatggaagtgctgactcttccagtctttatactatacacatttaggcctgttgttttgttttcataaaactgtaatcatataatatagacagttttataatctgctttttaaacacaacaattatataacatttagctgtttcatttgcattcaaattcataagggttccagtaactcatttatcagaaaaccaagagaaatattctcataaaaatataagtacataaggtcaggcatggtggctcacacctgtaatcccagcactttgagaggccgaggtgggcggatcacctgagggcaggaattcaagaccagcctggccagcctggacaacatggtggaaccccgtctccactgaaaatacaaaaattagctgggcgtggtggcgcgtgcctgtaatggtagctactcagaaggctgaagcaggagaatcgcttgaacttggcaggtggaggttgcagtgaactgagatcgcgccactgcactgcaaccagggcaccaaagtgagactccatctcaaaaaaagataaaaataaaaaataaaaaaaatgtatatatatgtatatatatttttccagacagggtcttactctgtctcacagtctgaagtgcagtgacgcaatcatagctcactgcagtctcaagttcccgggctcaagtgatcctcccacttcagcctcccaagtagctggaactacaggtgcatgccaccatgcccagtcaattttttttttaatttttcatagagacagagtctcactatgtttcccagtcctaataaacactatgtgataaaaagaaaaaagtaaatcattctgaagttaagtctttaatgagaaatgcaaataaagcatttctcaataaattaggggaagggaatcaactgaagaataaacatctttagtaaatcttttgctcatgtgcattaaccaatattcttgaaaaccaggattaatttactgtaccttcttaatattcctttgaaattctttatggtgcacaggtagcgtagaaaataactgcttcacactgactgtcatccctctggggtgggggtagggggttttctggatgattttcccatagtgatcaaacaccagtcgagtcccaaccttcgccgatacatggcaggtagaaatggtgacatcactgtgagagaataccaggcatggtgtgttcagtgagagatccgtgatgttgggcactgactactcttttcttcacttgcttttctctcaaaattttcttaaaaagctgatgatccctctgagataaccgagatctaaacggttgaggagtcatcataaaatctaaggtctggcatctaaaagacagtgagacagagagcactaaacatgctttgttttgataaaagctttgacttcatttttcaggttgaattgcaaaaccataaatgatctcaagatttattgattctcaaatagagatttgttttgttattactcttcaaacaaaattttttaaaagaatttttttaaagaatttttaaaaatttaaaaaaatttttttaaagaatccaaaagatattataattaaaatgtatatgtagggcagggtgtggtggctcgtgcctgtaattccagcactttgggaggccaaggagggcagatcacttgaggcctggagttccaggccagcctgggcaacatggcaaaaccccatctctactaaaaatacaaaaattagccaggagtggtggtgcacgctatagtcccagctcttcaggaggctgaggcatgaaagtcacttgaacctgggaggcagagactgcagtgagctgagactgtgccactgcactccagcctgggtgacagagtgtgactctgtctaaaaaaaaaaaaaaaaaaaaaaaaatatatatatatatatatatatatatatatatatatatgtatatatatgtgtgtgtgtgtgtgtgcatataattatttataaaaatttagtatctgtgctataattaaatagtgctttggtgaaatgtttccctaaaaattgataatgaaaaccaatggtaactatcatttattatctatatgttatgttcaaattgagaagttactgttttaataagggtaaccaatttttttaacaatactatttgcttcatttcattcatttattgctcacatttcagaagtactaggacttagattggcagtgagacaaaacagaattcagaagctggaagctgagatattgagacagaaaactgtaaataataatgattccaattaattttcagagaggtttttctaaggggtcaagtgaatggataaaaatattttatcacctcagtgcacaaagtgagctcagagcttccccccgaaagccaaaagtttcaacctgaggtaggtcggcaaactcttgaatcttagatgtgtgatgtttcagagctgaaagagagtataaagtaaggactaagatatcttaagtgctataacaacaaatatacatgatatctagtaactggctttaaaaaactgtttttgtgtttcccaagacagtgttactcaaaattctaagacatgtggcccaattattttataataggattagaaaaagttaacttacttaagccttcgaagttttcttcttctaccccacatccattgcctgaaacttcaatgagatccactccatagtccttaagctttagatctagaaagtttaaaatatttatatatttattaaaaatggacccatgctatcagtttttatattgatattatttataacgtgcaaatttaagtgtcgtaactagacctttagttaaacatactagtgtcattttgtatatttcatttttataaagttctttctggctatttactagcccagattaaatagtttagcattttctttctttcctctttttttttttttccttatgctagtcaagtgaagcagttggagtggagaaggaacaaaaaaatctgtaactggttgtgatcaattagttgtaaagaccgttgcactttgaccagccttttcctttgaaagaaataattttaacatacccagtaaggagaacgggggccaggcgcggtggttcatgcctgtaatcccagcactttgggagaccaaagcgagcggatcacctgaggtcagtagttcgagaccagcctgaccaacatggagaaactctatctctactaaaaatacaaaattagccaggtgtggtggtgcatgcctgtaatcccagctactggtgaggctgaggcaggagaatcgcttgaacctgggaggcggaggttgcagtgagttgagatcgtgccattgcaccgcagcctcggcaacaagagcaaaactccatctcaaaaaaaaaaaaaagaaaaaaaacagaactggttctggaatcagacttcctagattctattttattagctttataatctccaaaaaaggtaatttactgtcccttaatttcctcaactgtaaaatggaggtaataagttctatctcataaagttatttggcagattaataattttttgtctttttattttgtcattttcttttttttctttcctttttttttttttttaattttttgagattgacttttgctcttgtcacccaggctggaatgcagtggcacaatcgatcttggctcactgcaacctccacctcccaggtttaagcaattctcctccctcagccttctgaggagctgagattacagccatgcaccatcacatctggctaatttttctatttttagtagagacagggttttaccacgttggttaggctggtcttgaactcctgacctcaaagcatcagcccccctcagcctcccaaagtgctgggattacagatgtgagccactactccaggatttattttattttattttattttattttattgttttgagacggagtcttgctctgtccccaggctgccgtgcagtggcacaatctcggttcactgcaacctccacctcccaggtttaaacaattctcattcctgagcctccccagtagctgggattacaggcttctgccaccaggtctggctaatttttgtatttttagtagagacagagtttcaccattttggacaggctggtctcgaattcctgacctcaggtatccacccgccttggcctcccaaagtgctgggattacaggcatgagccaccacacccggcctactttattttttaatagagacgaggtctcaccatgttggccaggttggtcttgaactcttggcttcaagcaatccccccacctcagcctctcaaagggctaggattacaggcgtgaaacaccacgcccagctattctgcaaattaaatgagatatttctgtgcaactcttagcataacacctgcctggcgcaccataagaacacaataaaagctgttgttattattattactacctagctaagtactaggcacataataggtgctaactttaacttaaaaataataatttattactacatcaacacttgatagtcttatttcaataacaaatgtttcttgactacaacaacattcactgatcatttcttgtggcttaaaactctcccaaacttaccaatattagtggcaccagcatccagactgttttctactaactccttcaccgcagtgcttagactcggtaccaccggcccagagcaaatctgatggactgacttccgatcaataggtttgatggccttagcaggttctgtactaaagaaatcagttacaagaaacaaagcaagtattcagctatatattttcatcctgattttaactgtgggaaatgactcaacactgcaaatagtttacgggtctaatctattcatttattatattaacaaatacatttattatatccagaaatggaaacattgttttacaatccttaaacaagtacccaaaatacttctggatagacacttcaaattcaacagatccttactacctagtatccacatggagaaaacatacattgtatctctcaaattaccaaaatctttggcaataatggtgtcttctttcttgaaaactgaaagcatggccggtgcggtggctcatgcctgtaatcccagcaatttgggacacagaggcaggcggatcacttgagatcaggagtttgagaccagcctggccaacatcgtgaaaccctgtctctaccaaaaatataaaaaattagccaggcatggtggtgggcgcctgtaatgccagctacttgggaggctggggcaggagaatcgcttaaacctgggaggcggaggttgcagtgagctgagattgcagcattgcaccccaggctgggcaatgagcaaaaaaaaaagtaaaagcaacataatttcccacataattagaaaaaccaacagtatgctgggaaatacacaatgttttcagtcaaaatcatctcagaaattggataccagttatataactattccttatacacagttgcctttgataccctactccagattgaagctgccagctgctgtcttagcaaagaccctcaaagttcttgctgtacttgctttaagagtttttttttgttgttttttgtttttttttttttgagacggagtcttgctctgtcgccctgtcgcccaggctggagtgtagtggcacgatcttggctcactgcaagctctgcctcccgggttcacgccattctcctgcctcagcctcctgagtggctgggactacaggcgcccaccaccatgcccagctaattttttgtatttttagtagagacagggtttcaccgttttagccaggatggtctcgatctcctgacttcgtgatccgcctgcctcagcctcccaaagtgctgggattacaggcgttagccaccacgcccggcccgctttaagagttttataacggtttcatttccccttattccctgctccaacccatcctccactctatcaccagagctatttttgaaatcacgaatctggtcaaataatttttctgcttgaaaaattactagtgccccacttcctactatatgaaacttaaaatctagtcatcactgggccccaaactaccttcttttcagaatctctctaatcctttcccttcatcaagtcccctacattattattactattattattatttgagacagagtctcaccctctcacctgggctagagtgcaatggcatgatctcggctcactgcaacctccacctcccaagttcaagtgattctcctgtctcagcctcccaagttgctgggattataggcacccaccattacactcagctaatttttgtgtttttaatagagatggggtttcaccatgttggccaggctggtttctaactcctgacctcaggtgatctgcccgccttggccttccaaagcactaggattacaggtgtgagccaccgcaactggccgtcccctatattgcagcacagtgaacaactgtttcctgaacatcacaagctcttttaaacactacagtgtataagcaggtctctgtctaaactgctctcctcttgctcctctgcccaaccaatgtctgctcatccaaagaatgtatcccgtgtgttcactaacttagcaagttccagtaaacagtttaattgatcactcgttaagagaaggcaggaaacctccatgaaaagagaaatcagtgggtatttcctacagcatttaacacattgtaggccttaaataaacccttgtgaaataaacaaacctctttactcttcattctatgttgctaagaatctcaccaaagtctgtctaccatgtgaaactgcagatgacctcacagaaaatggaaagaagtatctctaaaaataagtttatttggcaacacactacaggctacaggtccagttctgattttttttcttttttttttttgagatggagtcttgctgtgtcacccaggctagactgcagtggtgcaatctcagctcactgcaacctctgtctcctgggttccagcgattctcctgcctcagcctcccaagtagctaggattacaggcgcctgccaccacgcccagctaatttttgtatttttagtagaaatgggatttcaccatgttggccaggctggtcgtgaactcctgacctcatgatccacttgccttggcctcccaaagtgatgggattataggtgtgagccaccgcacctggtccacttcagatatttagatacagacggcaaatttatttaaatgtctcaatacatttaaatgtagttacctaaatatatctaatatatttaaatgcagagagcaaatttgcgtttacaaatctgacatggaattcaactgtgctagccaagattcggtgtagcttactagccagaaatcacataccctaacaggtaaaaatgcattgcattttttaaaactgcgcagctatgcaaattaggatgtgtctggacgctctactgtccccaaaataacctcaatttttttttaaaggccaggcacagtgcattacgcctgtaattccagcgctttggggggccaaggcgggcggactgcttgagctccggagttccagaccagcttgggcaacatagctaaatccccgtctctacaaaaaaataaagtaaaaattaaaaataaaataatataaaaataaaaataaaaggggagagagaacaggtaggaaggaaatgcattcagtctatagggatttcacgttccggcttcaagtccacggccctgtgatgggatgtgggcagggcctgagacaggccgaacccaactcttcacagggccgaattctttgcccgcagcccagcaccccgaaggagcttgcctcggcttcaaggcgcacctaatgggcaccggatcgctggggcgctgaggatgccgctccggggcctccacgaggcggcctcgccacgcgcctcggccatgttccccccatttccagggaggttggacgccgtggttcttaaagagggcgcgcgagaggggcgaccgcgagcccagctcacctcgagctctcagctcgctccaaggatgcaacaccggatccgcctcggggactgggaaagttccctccacggctcccacaggcgccccgcctcctg

SEQ ID NO: 816 - DNA, 21358 bp, Homo sapiens
aaaaggaagagggagtgtttggatgaatctgatgatgagccagagaaggagctcgcccctgagcctgaggagacctgggtggcggagacgctgtgtggcctcaagatgaaggcgaagcgacggcgagtgtcgctcgtgctccctgagtactacgaggccttcaacaggctgcttggtaggaggacaccccagagagcacctccaatcctgttctttctaaaaagaggaaacttccaataaccacacttttccaatgggaaaaatatgccccagtgggtgagctctccatgcgggaggactctgaagtgatcactcatgagggacacttaggagtcaacagaggattaggtagacttgataaaggtcggtgcttgggataagaaagcttggttttgggccaggcgctgtggctcccgcctgagatcccagcacgttgggaggctgaggcaagagaattgcttgaactcaggactttgaggctgcagtgagctatgactgcaccactgcactccagcctgggtgacagagcaaaactctgcgtcaaaagaaaaaccaaggctgggcacagtagctcatgcctgtagttccagctactcgggaggctgagacaggagaattgcttaaacccaggaggcagaggttgcagtgagccaagatcaggccaatgcattccagcctggcccacagagcaagactctgtctcaaaataaattaataaataaataaaaataaaaatcaaacaaagaaaaacaaaatcaaaaatcaaaaaagtggtttcagctgtgccctctgaaacttaatgtttcttactgacttttctaaacctaagtgtctccatccatagtgggggataccaaggccatggtcacaccctgatgtgtgactgtctcatgaggaaatgatgggaattcctttatgactctgcagtggtccctccgtgtctgctggagggggtcccggctgattcccagctctacatcctgtagattctcacacccagggcctccttcggcctcttctcaggggagtctcagagcaggagcctctctcccttgcccagtgaaagtcattctcccctctcccatccacctcacccgcggccacaatcctgagactttcccccgggaggcacacttctcctcactgccctgctgctcccatggaaaccctgtcctgcttctcacgctgacatctgctctctaatcacagaggatcctgtcattaaaagattcctggcctgggacaaagatctgagggtgtcagacaaggtaaggttgttctctatgtaactgtgttcctgttctaacgcacggccagggggagggcgcagcttccaaacccacagttctccctccaccacctcccaccagatgctcctacagttttttttgtttttgtttttgtttttttttgtgagacacagtcttgctctgttgcccaggctggagggcagtgtctcgatcttgactcactgcagctgatgcctcctgggttcaagcgattctcctgcctcagcctccaagcagctgggattacaaacgtgaaccaccacgcctggctaatttttgtgtttttagtagagacggggttttgccatgttggccagattggtcccgaacacctgacctcaggtgatccacccgccttggcctcccaaagtgctgagattacagacgtcagcactgtgtccgaccagctcccatggtcttgagtcttggcacccacacatttttttttctgagacagagtccagctctgctccccaggatggagtacagtggcatgatcatagctcactctaattcctgggctcaagcaatcctctttccttagcctcctgaggagctgggactaggcacatgccaccatgctcaacgaatttttgaaatcttcgtagaaacagggtctcgctgtgttgcccaggttgttctccaactgttgggctcatgtgatcctcctgtctccacctctcaaaaagtactgggatcacaggcttgagccgccactcccggctattctttgtctttttatgatttgtcagcatctccctcaggactctgctggtctcttgcagagtgaatgagtggcccctgcctctcccatgggtcctttgggatctgagccctaggccaccgtctggctgcagtcctgaagctcctgggccctctactctcagctccttgggacagttctctgcctggcacacaaaagaccctcctgacaccagccgacctagacacaccccctccaaagatcccatcggagcccaccatcctgggagcatcacctaaaacccttcctccggcttctcggatttgcatccgaccttcgaatacccctccaccccgcaatttccacatgagcacagtcaccccaatgctgaggtcccttctctgatgggcaacccctccccagacccccattccactatctccacaatcttcctctcccaagatgtgacctctccctctctgtgttcctttctctccatcagtatctcctggctatggtcatagcgtatttcagccgggccggcctcccctcctggcaataccaacgcattcatttcttcctggctctgtgagtggtttgctgcctcctatccatcaatatccaacgccctgggacagcgggggaagtgggattccagcctttcatttattctttcacctatttgtcctctttactctgtgtacaaaaaagacaggattatagtatcttagactgttgtctctaaaaagaaactcaggctgggcatggtggctcaggcctgtaatcccagcactttgggaggccgaggcaagcggatcacctgaggtcaggagtttgagaccagcctggccaacatggcaaaccccgtctctactaaaaatagaaaaatcagtcgggcatgttggtgtgcacctgttatccaagctacttgggaggctgaggcatgagaaccccttgaacccaggaggtggaggttgcagtaagctaaggttgagccactgcactccagcctgggcaacagagtgagactttttctaaaaacaaaagagccaaaaaaaaaaaaacaggcaaaaaaaccaaactccaatgccagtgtacaaataaaagagtaaaacaggccaggtgcggtggctcacgcctgtaatctcaacagtttgggaggccgaggtgggcagatcacaaggtcaggagagcaaaaccatcctggctaacatggtgaaaccctgtctccacttaaaaaaaaaaaaaaatacaaaaaattagccaggtgtggtggcgggcacctgtagtcccagctactcgggaggctgagggaggagaatggcgtgaacctgggaggcggagcttgcagtgagccgagattgcaccactgcactccagcctgggcgacagaatgagactccgtctcaaaaaaaaaaaaaaaaaaaaagaacaaaaaacaaaaggaaccatgaaccgctcctaaggggagaacaaaaggagcggaggagcggacatgacacttcccccagcaagcagacgtttccggttcttctctctctctccttcccacatcaaccgcaaaagccaccaacctcctctgggttcccgtgacagaggtcacagtccaggtcccccttgcatcacttgaatccactgtcaaatgctccctgctggggtctcctggagtctctccccaagccaaggggcttcctagtgcagcctgaacatctttccaaagcacgacaacctcactgcccacctgaacaacttccttagctgatgtctttctctatcgaggccagggtccacagtgccaattccaccctctctacaatctctacaaccacactggctcgccatcttggtgtttcctggcttggcttcactgctccttccaaatgccctccacttgactttgcattcgtgttttctgtctgggtgtcccacacacatgtggttctgaagggaagcacccattccttgaagtcggttcaccccacagcctctgtgatgccttccctcatcttccaacttctgcatgcccgtagctctccagttacatcctcttataatgtgacattgggattaggtcatctcccctgattactcccagtcccattagactagatgcctgtagaaggcagggtcctggcaaaatatcaatgtattcaattgctttttttttttttttgagacagacttgccctgtcccctaagctggagtgcagtggtgagatcatagctcaccgcagcctccatatcctgggctcaagcgatcctcccacctcagcctcttgattagctccgactacagggctgtgccaccacacctggacagttatttatttatttatttatttatttatttatttatttatcaagacaagagtgttgctgtgtctctcaggctggaatggaggggcccaatcttggctcactgcaacctccgcctcctgggttcacacaattcttatgcttcagcctcttgagtagctaggactaatgggtgtgccaccgcaccaggctgatttttgtatttttagcataaatggggtttctctgtgttggccaggctggtctcaaactcctggtctcaagcaatccacctgcttcagccttccaaagtgctgggattacaggcatgagccaccacgtctggcgtattttttatatttttaatagagacaagggtcttgctatgttgcccaggcctgtctcaaactcctggcctcaagtgatcctcctgcttcggcctcccagtgtgctgggattccaggcctaagccaccactcttggtcaccagttgggtttttgtctccatcctgaaggagtgggagatgcccttgatcaggtctctgtccagcagagccctcctgaggaaggcgtggctctctgcagggtgggtgccagtcctgagctagggacggtcccttaccttcctctctgggaagctgacctcagccggaggtctctcctggtggtgcccctgagcagcaacctgatttctgtcctcagctatctggccaatgacatggaggaggacgacgaggcccccaaacaaaagatcttctacttcctgtacgggaagacccactctcacatacccttgcgccctaagcattggttccagttatgccgtcccatgaacccgagggccaggaagaactgctctcagatagccttgttccagaagcgtcggttccagttcttctgttccatgcgctgcagggcttgggtttccccggaggagttggaggaggtgggtggggcctggggaggtggaggatgtggggaggaatcgggtgggctggaggctggacgaggggagagaggggtatcctggggagtccccgtcttctcaaagcgcatttgtttttccagatccaggcttatgacccagagcactgggtgtgggcgcgagatcgcgcccacctttcctagagctccagggaccgtggaggcctgaggtcatcggcctgagagaaggtacatctgcatcctccggggtaaaggcagaatattggggtctatttcggaaatccaaggaacccaattgcttgatctggcttcaagcctcggcaacgtggcgagatatcccctctccacaaaaatacaaaaattagccaggcgatgtgggaggcatctctactcccaactactcaagaggctgaggcaggaggatcgctggagcctgggaggtcggggctgcagggagccctgatcctgccactgcactccagccggggcgacagagtgagaccctgcctcaaaaataatcataaatactgagttcggggaggttctttatgattgatgcacttgagttaccgatttgggtcgagggttcagtgaagctttggtttacatcttgtgcagctaaccatgttgagcacagagcatgagacttcgtcatgaggaggtaggattatggattaggcttctggactcgtggtttgtgatgttgtcacattagaaacagatctagcacagttacaagtttagatctgaagtgacacaaaagaccctagctgtgatgaagtccaaagccacattctctgagggtgccctactccctgggaagacccacccaaagtcctcgctatgaagcagatcactggggctgaccttgggtgtattaagttttggagtcagggtcaccaaagcgtgagtttcacagttgaacacgatggttcagaagcagggtatagaatgaaaggcaggagataaaatcgcacttctcaattgctctgaactctagctagacttgacatgggacgtgaataaccttcctgtctagagagctgtctccttgaggtgtgacattgtctctctcacttccagaacaccggacccaggggagatgtggattttcagcaggaactttattccagtgctaatggcagacatcaggaaggaggagaggagccatttgtgcagatcatctagaagaacctggaccattcttgacagagctgaatacagtgatcacgttgtcctccaaggagcaggggtggggtggggtacttctaggagtccttggagaaaagtaagaaaccaggagtgtttccagttccaccctttcctgcggcaccacctccctttttatattgctgaatgccaacctccctggggcggaacctggaggtcctgtttcttacggacttggttgccacagtccaggagcatttgaaggcacagtgcaggggctcagattggcacagaattctttgtgaaatatgagtgccacagactgtaacagatagcttcatgcacactatgcattttattggtttgtttggaaaatgttggccattgaatcattaataggtttatttcaaatagtttggaaattgttgtacttttgaaaacatgctgttcctgtagagttttttgatgagagttatagttgttatatatacataaagataattttcttttcatttttaagtgagaattctttttatcctaaatcttttattatctttaaatttttctctgtattattatatgtgctcctgaagcgagcactctttttatctatgatacttccataataatctcttctatttatagctattggtagttcccccaaattctggtcatagaaatttttatttgctgtttaggtttgtgactgaattgtgagaattcagttgtgatttttaacatgtcttagatatatatactaacatgtctaatatatactatctattttattgatttatttcgaaaaagatgggcaaagaattatttaaatattattttatttatttaaatatttattaaatatatttatttatttaaatatttattaaatatatttatttatttaaatgttattactttaaatattattttaaatattttggaaatactggtatttttgaatagatgctgtttctataaagctgtgtgatgggtattataactgttatatacacataaatataattttgttttcctttttaagagaggattctttttatcctaaatcttttacctttcaatctttgtatctattactacatatgctgctgaagggagcagactttttatctatgatacttagttaatgtatatattacatttatagctatgtggtagttcccctaaattcttgtaaaaataaatttttatttgatatttagtgtatgtttgaaatgtgagaattcagatggaattttttatcttgttttggcatgtttgtatgttactttaaagaggatgtgtgttctaaaggaggacatgagctgtgtgttttcaagagaacagtgcagtgcatctcttggggaaacataataaagatgaacttttctcaccttcacagtgagtgtgatcatattgtggtctggattgattatttgctgtcaagtgacatttttccttaatggggttgtggttatttgaacatatttattagctctggaagataatcctgtgttgttttttatgtagaaaaaaacataaggctgggtgcagtgctcacacctacaatcccagcagttttggaggtcatggcgggaggatcacttgaagcctatttttaatttttattttttaaagaaaaacaatagaagagaaggctgatcccaagctacagggtttttttgtttgtttgtttgtttgttttggagacagtctcgctctgtctcccaggctggagtgcagtggcacaacctcggctccctgcaactttcacctccgcgttcaagcaaattctcctgcctcagcctcccaagtagctgggactacaggcacccgcctgtacgtctgactaacttttgtaaaaatagtagagacaaggtttcaccatgttggccaggctggtctcaaactcctgacctcaagtgatccacccgcctcagtctcccaaagtgctgggattataggcatgagctactgcgcccagaccccaggctagagttttaaagcaggaaatgagagaaagatattgagagaggaaaaccaggtggtaagaaaactctaaaggtggctgggcgtggtggctcacgcctgtgatcccagcaggagttcgagaccaggcaggagaatcaccagcagagaatatgtctccccaacccctctcaaaaaaaaaaaaaaaaaaaagggccaggcgcggtggctcaggactgtaatcccagcactttgggaggctgaggcgggcggatcacaaggtcaggagatcaagaccatcctggctaatatggtgaaaccccatctctgctaaaaatacaaaaaattagctgggcgcggtggcaggcgcctatagtcccagctactccggaggctgaggcaggagaatggtgtgaacccaggaggtggagcctgcagtgagctgagatcgcgccactgcactccagcctgggtgacagagcgagactccatcacaaaaaaaaaaagaaaaaaaagaaaaaaagaaagttcctgcaacagttcaagctgtgaaagacaggcgctctgccatgcaattctttgtgatttttcttttttatttttggagtcggggtcttgtgctgtcacccagactggggtgcagtggtgcggtcacagctcactgcgggctcagactgaagctcaagcgatcttcttatcttgcctttctaattgctgggattataagcatgagccactgcacctggcctgtgtgacgtaattctgatgtcaactccctgatgttacatcaaatgctacaggttaaggccaccagcccccgctaggctgccctcgcttcagatgcagctgcaagcttgggtgtccacagactgcatgtacttctcaccaactggctgcaaatttggaggttcccaccacgtcctcaggtttgataattcactataacaacccacagaactctgaaaagcatgatactttctctttctttatttgagacagagtcttgctctgtcgcccaggctggagtgcagcggccaccatgcttggctaattttagtatttgtattagagacagggtttcgccatgttggccaggctggtcttgaactcctgacctcaggtgatccgcccaccttggcctcccaaagtgctgggattacaggcatagccaccgtgcctggctgacttctagagtttcaataacagagatgtggttcaagaagaaaagggagacatgttttgtagacagcaggagcttcatgaaaagaagccaatgaagggcaggatgtgtagctgtctacctacaggaaaccagccaggagcctccccgcagggagttcagcacagacggccgggaaaatctgcattaacctgagctctggacctaagagaggacaaggccttgactgtttctacagactcacaagacgcaatctctgcggtccatgcccgtggtgtgatctgggaaacagggggccttctaaatgccaacaacaaggaaatcaaatgcgcaacagacagaaataccggcattgacgcgggccatggagaggcctaaacagatgactgcagtccactgccaaggtcatcaaaggggtgactctgaaataagaaatttcagacgccacggcccaaatagctgcacgaggtggggaagtcctccacatgcctctgcttccttcagtacctcttcatgaaataagcggaggtacttccctggggaatttcctttctctttctttctttcgagacagagtcttgctctgtcgcccaggctagagtgcagtggcgcgatctcggctcactgcaacctctccctcccgggttttggcaattcttctgtctcagacttctgagtagctgagattacaggtgtgtgccaccatgcccagctaatatttgtatttttactcgagacagggtttcaccatctaggccaggctggtcttgaactcctgacctcatgatccacccgtcttggcctcccaaagtcctgggattacaggcacgagccaccgcacccagacttctttattttttgagatgaagtttcgctcttgttgcccaggctggagtgcaatggcgagatctcagctcactgccacctccacctcccaggttcaagtgattatcctgcctcagcctcccgagtagctgggattacaggcacccaacaccaaacccagctaactttttgtatttttagtagagatggaatgtcaccatgttggccaggatggtcttgaacccctgacctctaatgatctacccgaattggtctcccaaaatgctgggattacaggcgtgagccactgtgcccagcccctcccatacctcttttggccaaggcagtacaattcagagaatcttgccagggaagactggtaaatggacgtcaacatgatgcctatggctcctggtggatttagatacctcctggtgcttactgatacctttaccagttacatgggggcttttccatgccagactgaaaatgcaggagatcactgatcaaccttcaactatttactagcagaacactgaggggactctgcagtcaccaatatctcctattgcacttggataaacacctcccgggaaatagagatgaatagaaaggaaatagtcaaacaagcagaatggctacattccttcaaccagaagggtccattagtctgttttcacactgctataaagaactactggaaactggggaatttatgaagaaaacaggtttaattgactcacagttctgcaggctgtacaggaagcatggctggggaggcctcaggaaactgacaatcacggcagaaggcgaaggggaagcaggcacgtttctggccatggtggagcaggagagacagagagagtgaagcgggaggtggtgcatgcttctaaacaaccagatcccatgagcgctcactcactatcatgagaacagcaagggggacgtcagccgccatgagccaatcacctcctaccaggtccctccctcaacactgggaattgcaatttgacatgagatttgggtggggatacggagctgaaccatatcaagggtagtacaaccactgagattgattgactgagatggagtcccgctctgttacctaggctggagtgcagtggcacaatctcggctcactgcaacctccgcctcccaggttcaagcaattctcctgcctcagcctccctagtagctgggactacagcacacgccaccacacctggctaatttttgtattttcagtagagacggggtttcaccatgtttgccaggctggtcttgaactcctgacctcgtgatcaccctgcctcggctcttcttttgctggaattacaggcgtgagccaccgcacctggccaaccactgagatttagaaggcagtcgagtccactataccacacctcacctggtttcttcctctgttggggcgcctcgtggccactgttctgttactttttggtcctatttatttaaatggatggtgagctgtttgtcctccaggatccaacacttccaccttcagcttgtattacaacaataccagcctttcaagctactccaggtgaccccagaactcatttgaactcagaagcccaagagtttcattcctctcactttaggggactaagtgcccctagtcagcatgaagtcgatacagaagcatgacctccatccctaatccctcaagaatgaggagtggaaggtgtcggcaggagggtgggacgcggtttgtaaatctgtaactgcatcagaccaaatctagttcaactttttttttttttttttttgatggagtttcgctcttgtcacccaggctggagtgcaatggcacgatctcagctcactgcaacctccacgtcctaggttcaagcattctgctgcctcagcctctggggtagctgggattacaagggtgcgccaccacgcctggctaatatttatatttttagtagagacggggtttcaccattttggccaggctggtcttgaactcctcgacctcaggtgatccacctgccttggcctcccaaagtgctgggattacaggcgtgagtcaccgcacccgaatcagttcaacttttatgtaatgaagttgtcagttgtttttcaattgccatcgacccgcaggttgaaggtcatgtaccctgtgcatgcccaggttaaccaagcgtgccaccgtggagtggaacctaagagctcagcctgaagagctcggaccgatttaagaaccagacaccccaaggcaggagccaggatccaatcagattgagttttggcgtcaccccatggcaggatccagtcagatcacatctcccagcattactttattgcaagatccaatcaaatcacacctcattaccctacgcttataaaacctgacatagccccgagctgtgtaagggagatttgagtacttcctcctgtgttcttgctggctgacttacaaaaaagctttaaaaaaaaagccgggcgtggtggctcacgcctgtaatcccagcactttgggaggctgaggtgggcagatcacttgaggtcaggggtgcaagaccagcctggccaacatggtgaaaccccatctctactaaaaatacaaaaattagctgggtgtggtgacacacacctataatcccagctactcgggaggctgaggtaggagaatcacttgaacccaggaggcggaggttgcagtgagccaagatcacaccactgcactccagcctgggcgacagagtgagaagactccgtctaaaaaaaaaaagttaaaattagcaccgaatgctttacaagtaaaaaaagtttttagctgcatatgtttaagtaactttttagattataagaaatatgcatgcaaaatggaaaggcacaaagaagagagcaaaaagtgcatgagatctcacatccaaggataaccgctgagaacatggaagtgctgactcttccagtctttatactatacacatttaggcctgttgttttgttttcataaaactgtaatcatataatatagacagttttataatctgctttttaaacacaacaattatataacatttagctgtttcatttgcattcaaattcataagggttccagtaactcatttatcagaaaaccaagagaaatattctcataaaaatataagtacataaggtcaggcatggtggctcacacctgtaatcccagcactttgagaggccgaggtgggcggatcacctgagggcaggaattcaagaccagcctggccagcctggacaacatggtggaaccccgtctccactgaaaatacaaaaattagctgggcgtggtggcgcgtgcctgtaatggtagctactcagaaggctgaagcaggagaatcgcttgaacttggcaggtggaggttgcagtgaactgagatcgcgccactgcactgcaaccagggcaccaaagtgagactccatctcaaaaaaagataaaaataaaaaataaaaaaaatgtatatatatgtatatatatttttccagacagggtcttactctgtctcacagtctgaagtgcagtgacgcaatcatagctcactgcagtctcaagttcccgggctcaagtgatcctcccacttcagcctcccaagtagctggaactacaggtgcatgccaccatgcccagtcaattttttttttaatttttcatagagacagagtctcactatgtttcccagtcctaataaacactatgtgataaaaagaaaaaagtaaatcattctgaagttaagtctttaatgagaaatgcaaataaagcatttctcaataaattaggggaagggaatcaactgaagaataaacatctttagtaaatcttttgctcatgtgcattaaccaatattcttgaaaaccaggattaatttactgtaccttcttaatattcctttgaaattctttatggtgcacaggtagcgtagaaaataactgcttcacactgactgtcatccctctggggtgggggtagggggttttctggatgattttcccatagtgatcaaacaccagtcgagtcccaaccttcgccgatacatggcaggtagaaatggtgacatcactgtgagagaataccaggcatggtgtgttcagtgagagatccgtgatgttgggcactgactactcttttcttcacttgcttttctctcaaaattttcttaaaaagctgatgatccctctgagataaccgagatctaaacggttgaggagtcatcataaaatctaaggtctggcatctaaaagacagtgagacagagagcactaaacatgctttgttttgataaaagctttgacttcatttttcaggttgaattgcaaaaccataaatgatctcaagatttattgattctcaaatagagatttgttttgttattactcttcaaacaaaattttttaaaagaatttttttaaagaatttttaaaaatttaaaaaaatttttttaaagaatccaaaagatattataattaaaatgtatatgtagggcagggtgtggtggctcgtgcctgtaattccagcactttgggaggccaaggagggcagatcacttgaggcctggagttccaggccagcctgggcaacatggcaaaaccccatctctactaaaaatacaaaaattagccaggagtggtggtgcacgctatagtcccagctcttcaggaggctgaggcatgaaagtcacttgaacctgggaggcagagactgcagtgagctgagactgtgccactgcactccagcctgggtgacagagtgtgactctgtctaaaaaaaaaaaaaaaaaaaaaaaaatatatatatatatatatatatatatatatatatatatgtatatatatgtgtgtgtgtgtgtgtgcatataattatttataaaaatttagtatctgtgctataattaaatagtgctttggtgaaatgtttccctaaaaattgataatgaaaaccaatggtaactatcatttattatctatatgttatgttcaaattgagaagttactgttttaataagggtaaccaatttttttaacaatactatttgcttcatttcattcatttattgctcacatttcagaagtactaggacttagattggcagtgagacaaaacagaattcagaagctggaagctgagatattgagacagaaaactgtaaataataatgattccaattaattttcagagaggtttttctaaggggtcaagtgaatggataaaaatattttatcacctcagtgcacaaagtgagctcagagcttccccccgaaagccaaaagtttcaacctgaggtaggtcggcaaactcttgaatcttagatgtgtgatgtttcagagctgaaagagagtataaagtaaggactaagatatcttaagtgctataacaacaaatatacatgatatctagtaactggctttaaaaaactgtttttgtgtttcccaagacagtgttactcaaaattctaagacatgtggcccaattattttataataggattagaaaaagttaacttacttaagccttcgaagttttcttcttctaccccacatccattgcctgaaacttcaatgagatccactccatagtccttaagctttagatctagaaagtttaaaatatttatatatttattaaaaatggacccatgctatcagtttttatattgatattatttataacgtgcaaatttaagtgtcgtaactagacctttagttaaacatactagtgtcattttgtatatttcatttttataaagttctttctggctatttactagcccagattaaatagtttagcattttctttctttcctctttttttttttttccttatgctagtcaagtgaagcagttggagtggagaaggaacaaaaaaatctgtaactggttgtgatcaattagttgtaaagaccgttgcactttgaccagccttttcctttgaaagaaataattttaacatacccagtaaggagaacgggggccaggcgcggtggttcatgcctgtaatcccagcactttgggagaccaaagcgagcggatcacctgaggtcagtagttcgagaccagcctgaccaacatggagaaactctatctctactaaaaatacaaaattagccaggtgtggtggtgcatgcctgtaatcccagctactggtgaggctgaggcaggagaatcgcttgaacctgggaggcggaggttgcagtgagttgagatcgtgccattgcaccgcagcctcggcaacaagagcaaaactccatctcaaaaaaaaaaaaaagaaaaaaaacagaactggttctggaatcagacttcctagattctattttattagctttataatctccaaaaaaggtaatttactgtcccttaatttcctcaactgtaaaatggaggtaataagttctatctcataaagttatttggcagattaataattttttgtctttttattttgtcattttcttttttttctttcctttttttttttttttaattttttgagattgacttttgctcttgtcacccaggctggaatgcagtggcacaatcgatcttggctcactgcaacctccacctcccaggtttaagcaattctcctccctcagccttctgaggagctgagattacagccatgcaccatcacatctggctaatttttctatttttagtagagacagggttttaccacgttggttaggctggtcttgaactcctgacctcaaagcatcagcccccctcagcctcccaaagtgctgggattacagatgtgagccactactccaggatttattttattttattttattttattttattgttttgagacggagtcttgctctgtccccaggctgccgtgcagtggcacaatctcggttcactgcaacctccacctcccaggtttaaacaattctcattcctgagcctccccagtagctgggattacaggcttctgccaccaggtctggctaatttttgtatttttagtagagacagagtttcaccattttggacaggctggtctcgaattcctgacctcaggtatccacccgccttggcctcccaaagtgctgggattacaggcatgagccaccacacccggcctactttattttttaatagagacgaggtctcaccatgttggccaggttggtcttgaactcttggcttcaagcaatccccccacctcagcctctcaaagggctaggattacaggcgtgaaacaccacgcccagctattctgcaaattaaatgagatatttctgtgcaactcttagcataacacctgcctggcgcaccataagaacacaataaaagctgttgttattattattactacctagctaagtactaggcacataataggtgctaactttaacttaaaaataataatttattactacatcaacacttgatagtcttatttcaataacaaatgtttcttgactacaacaacattcactgatcatttcttgtggcttaaaactctcccaaacttaccaatattagtggcaccagcatccagactgttttctactaactccttcaccgcagtgcttagactcggtaccaccggcccagagcaaatctgatggactgacttccgatcaataggtttgatggccttagcaggttctgtactaaagaaatcagttacaagaaacaaagcaagtattcagctatatattttcatcctgattttaactgtgggaaatgactcaacactgcaaatagtttacgggtctaatctattcatttattatattaacaaatacatttattatatccagaaatggaaacattgttttacaatccttaaacaagtacccaaaatacttctggatagacacttcaaattcaacagatccttactacctagtatccacatggagaaaacatacattgtatctctcaaattaccaaaatctttggcaataatggtgtcttctttcttgaaaactgaaagcatggccggtgcggtggctcatgcctgtaatcccagcaatttgggacacagaggcaggcggatcacttgagatcaggagtttgagaccagcctggccaacatcgtgaaaccctgtctctaccaaaaatataaaaaattagccaggcatggtggtgggcgcctgtaatgccagctacttgggaggctggggcaggagaatcgcttaaacctgggaggcggaggttgcagtgagctgagattgcagcattgcaccccaggctgggcaatgagcaaaaaaaaaagtaaaagcaacataatttcccacataattagaaaaaccaacagtatgctgggaaatacacaatgttttcagtcaaaatcatctcagaaattggataccagttatataactattccttatacacagttgcctttgataccctactccagattgaagctgccagctgctgtcttagcaaagaccctcaaagttcttgctgtacttgctttaagagtttttttttgttgttttttgtttttttttttttgagacggagtcttgctctgtcgccctgtcgcccaggctggagtgtagtggcacgatcttggctcactgcaagctctgcctcccgggttcacgccattctcctgcctcagcctcctgagtggctgggactacaggcgcccaccaccatgcccagctaattttttgtatttttagtagagacagggtttcaccgttttagccaggatggtctcgatctcctgacttcgtgatccgcctgcctcagcctcccaaagtgctgggattacaggcgttagccaccacgcccggcccgctttaagagttttataacggtttcatttccccttattccctgctccaacccatcctccactctatcaccagagctatttttgaaatcacgaatctggtcaaataatttttctgcttgaaaaattactagtgccccacttcctactatatgaaacttaaaatctagtcatcactgggccccaaactaccttcttttcagaatctctctaatcctttcccttcatcaagtcccctacattattattactattattattatttgagacagagtctcaccctctcacctgggctagagtgcaatggcatgatctcggctcactgcaacctccacctcccaagttcaagtgattctcctgtctcagcctcccaagttgctgggattataggcacccaccattacactcagctaatttttgtgtttttaatagagatggggtttcaccatgttggccaggctggtttctaactcctgacctcaggtgatctgcccgccttggccttccaaagcactaggattacaggtgtgagccaccgcaactggccgtcccctatattgcagcacagtgaacaactgtttcctgaacatcacaagctcttttaaacactacagtgtataagcaggtctctgtctaaactgctctcctcttgctcctctgcccaaccaatgtctgctcatccaaagaatgtatcccgtgtgttcactaacttagcaagttccagtaaacagtttaattgatcactcgttaagagaaggcaggaaacctccatgaaaagagaaatcagtgggtatttcctacagcatttaacacattgtaggccttaaataaacccttgtgaaataaacaaacctctttactcttcattctatgttgctaagaatctcaccaaagtctgtctaccatgtgaaactgcagatgacctcacagaaaatggaaagaagtatctctaaaaataagtttatttggcaacacactacaggctacaggtccagttctgattttttttcttttttttttttgagatggagtcttgctgtgtcacccaggctagactgcagtggtgcaatctcagctcactgcaacctctgtctcctgggttccagcgattctcctgcctcagcctcccaagtagctaggattacaggcgcctgccaccacgcccagctaatttttgtatttttagtagaaatgggatttcaccatgttggccaggctggtcgtgaactcctgacctcatgatccacttgccttggcctcccaaagtgatgggattataggtgtgagccaccgcacctggtccacttcagatatttagatacagacggcaaatttatttaaatgtctcaatacatttaaatgtagttacctaaatatatctaatatatttaaatgcagagagcaaatttgcgtttacaaatctgacatggaattcaactgtgctagccaagattcggtgtagcttactagccagaaatcacataccctaacaggtaaaaatgcattgcattttttaaaactgcgcagctatgcaaattaggatgtgtctggacgctctactgtccccaaaataacctcaatttttttttaaaggccaggcacagtgcattacgcctgtaattccagcgctttggggggccaaggcgggcggactgcttgagctccggagttccagaccagcttgggcaacatagctaaatccccgtctctacaaaaaaataaagtaaaaattaaaaataaaataatataaaaataaaaataaaaggggagagagaacaggtaggaaggaaatgcattcagtctatagggatttcacgttccggcttcaagtccacggccctgtgatgggatgtgggcagggcctgagacaggccgaacccaactcttcacagggccgaattctttgcccgcagcccagcaccccgaaggagcttgcctcggcttcaaggcgcacctaatgggcaccggatcgctggggcgctgaggatgccgctccggggcctccacgaggcggcctcgccacgcgcctcggccatgttccccccatttccagggaggttggacgccgtggttcttaaagagggcgcgcgagaggggcgaccgcgagcccagctcacctcgagctctcagctcgctccaaggatgcaacaccggatccgcctcggggactgggaaagttccctccacggctcccacaggcgccccgcctcctg

SEQ ID NO: 817 - DNA, 1300 bp, Homo sapiens
ctcaagcaatcctccagcctcagtctcccaaatagctgcaattacaggcgtgagccaccatgcctggctgagagggaatcgttaagaaggagtgggcaggggcaagaacactgtcagagacagtgtgttggccacggctactacagcaaattggctgcttcctgtgatcgcacgggttgagggctcagttccacaaggctgccccagcatcagatgccagtcgcaagctcacgtggtgcctgtgcttctgacacagggctataaaaattgaggttcccatgatcccctccttgggttcaattaattttctagaatggtacctagaactcagggaagccctttacttacatgtgtccccttataaaggatattatagggcctggcgccatggctcatgcctgtaatctctgtgcttcaggaggttgaggggggaggttcacttgagcacaggagtttgagaccaacctgggcaacatagcgagaccccgtctcaaaataaagatataggatattacaaaggatagttatgaacagccagatataagagatacacagagggaggcctgggggaaggggtgcaaagcttccgtgtcttctctaggcactgcaccctctaggaagctccatgagttcagttatccagaagccctctgcatcccttttgggtttttatgggcttcattataaaggcatgattgggccaggcacagtggctcatgactgtaatcccagcacattttgaggctgaggtgggagaatcaattgagccctcaggtggcaactgaggctgcagtgagttgtgattgcaccactgtactccagcctgggtgacagagagagagcctgtctcaaaaaaaaaagacaaaacaaaaaacctggccaatacggtgaaaccccatctctactgaaaatgatcgtcacctgatccccaccccttgaagatgcctccaccctctccatacgcatttggtcagcactaactgccctgggtgacaggcacactgcactgggtgacaaggacccaaagctacaccagccagtgccccagccctcaagcacctccctgtgcagaaggaagacaacacagaaaagggaagcatggttgtcacagaggcccagaggactgctggctgatgtcactgaatggggaagtggttggccgcacaggccccaagctcagacctgatgccacagtggacgttcctgggccatgtgacctcaggctaggctcagaaccaccctcagggcctccgtttctttctgtataaattgaggaccatacagagatgctgcctacctc

SEQ ID NO: 818 - DNA, 14036 bp, Homo sapiens
ctgggaacaataacatgagagtttattatcacatgactactcaggaggggacatgaagcggagcaggatggggaaggggtgtaaggaatgggcaagtgctgctggagcagggctgtggccacggtcatggggccaggataactggggctgttgaagagcctcttttcctcagtctggttcttcttccagcagtcagatgcagggacgcccggtgcagaagcaccaggcactaataatcaggagaggcatggctagattccactcacttccaacatttccttctggtctcttttctaatggaagaggaaaggcaagacaatcgtgagtgggagagaaagggcggagtctctcctccaggggcagcttagctctggagctaccagaatcagcagcatggtacctgatccaaaggcatagcatggatatggacttccctggattcctgggctctttgacttgggggccacttggttggggataggggctttctgggctgggccaccactgggtagaaagacaggcatgataataggtgggacttgggtcatgggcccctttctcctccccaaactgtccactgtccattcctgtctcctttgagcagttccactgccccaaatacacaggcacacaccttagggactcacccctttggttgggaacattctccagcagtacagccacagaggggtcagagatgccagaagcagcagaatccagacacccaagagcatggcctgaagggttctgaacaaggcctggggacagagggccaaggccataagcaccaggatgacagctgccttcctgctctgtccccatgctccttattgacctgggaaaatctctacccctttatctccaagttcgtggcttctggaggggaagtcaatgcattcaatgtacagaatacagctggaaactgctcacattgggcctgtgtcctcatttgtacagtgacaggtttgggctatgatttgattccctgataacctccaagacttcagaggatcaagggaaaacatgcatttaacacctttgcagcacttggcacacttgctatagtggttcatttattattattttaatgcttgtatttcccacttgtctgtaacaccctacaggagccatttctattttgtctgatgctttgtctttggtgacaatacgcaagcttggtgcagaataggtaacacctatttctggtggagaacctgactcttgcccctggcctggcctggccatccctgccccacctgctgctgccccttccccttggccacctaccttcagcatgtccatgaaggaggtacataggtgtagccttctgacttcttctggactctgagtgggggctggagtgttccagtcactcgagctggagatgcggcaggcactgttgtaataagagtagccatatcggaaatcttcattccaaagtttgagggcagcgatggctgtggagaaagctgccagcgttagcagagtcctcagcagggcctggggagggaggaggcagagagaaatctttgtgtttcagtctctctcagagtccagtcgggggaaaaaagggcaaggcccagagaagcctgcaacagggcaggagattggggtgacctccagcctgaacctggtcccctcccatgcccttccctgaacttacccagtatgtaccaccccgtttctcgtaaatgaaggcagcagctccagccagcacagcctggggagagattgagccaggagcaggcttagtacaggaaatgcaactcctctcccacgagagagcctccatgcaggcccttccccagcacacagcttgggcgggaggtttcatgctaagctttattatccatggtaagataattgctgagagggtggagcctggatccaactcctgaggctgcaaaaggccctgctttagtgacacctaagagcttgtggtcaagccaggtgtgagcccctcttcccttctaaaccttcctttttaaacaacaccaagtgctttatgaaagttctagggatggtgggatcctgtggataaaagtcatggggtgctggagaagatctcaatgaagggtgagtctatacagagtgggcactgttaggtctagaagcctgtcctaacagtgcccaataatccactcagctgggcttgaagaacaggaaatctagtatgtcccagtggacaggtggacctgaatcctgtttggctaattctgtaattaagctgggtattttgccacaggctgggtgaaggtaattactctcggcttctgtcagtaaatatgagtgttttagtgctattctgagagtgtaggtaccatgaccagcctacccagctcctgtgcaaactgcacacacccatctgttgacaacaattcctgggtttccattgtgtacagggcctgtggaggacaatgagaataaccagggggtgatgcttcctgggggaccacatactatctggaacgctctgccttccccatctcaatgcaagtatctggagatgagcaggtccttagatccttagttgacattaactgttgaaggcagggagaggcagccagcctggtgggaacagcactgggaagggtatgggagagcagacagtgtgaataggacatgccaccaccgccctcagctgtttgctcatctgaacaggcagggaatggtcctagataatcagatctctccgactgccagcattctgtggcgccatgttggaggaaggcaatcaggagagcaatgccccacccctctcacaggcagtcaagcactgtcctgctctactcaccacagcccctgtccagatggcagctcccgaggtgacgaggagggtgtagtcgcggatgtagaaaaatcctcctaggactgcactcaagatccccagcacgatctgcatcacctgaaagacaaaggacccaagatcccggctcctaggtggacctgccactgcagggattaaccgctaaaaccccaaaaagagagggagaggtagagagagagagaaagaaagaagagaagagaagagaagagaagagaaaaggagaagaaagaggaggagaaggagaaagaagaagaggcaggaggaggagaaaagagaagggaaaggaaggagaggagagccggcccatcctgagtttggcccagaggaaaggatggactcagggctccactgattgggactctgcatggtcagtggctcctccacaccccttcagcccagagcctcccctccccaggctcttactgagaaggccagagaatcacatcgctaagtaagaagacataactggctcggtgtcctgttcagagggaggctggcagagagtgctgctgcggctggaggtggggagttcctcccgccgcccgacgaggcaggccgtcacactcacccacgaggccaccagcagccggctgctgcccctggcctgggtggcccggggccgcagcgcagagcagcaggtgagcaggagcttggccagggcagactcctggtggatgtgcacatcgatgtgggtgtgctgtggggcctccggggccatctcatcactgtcggctgttcccattgtcagggacacagtctatgaggaagggagcaccagagaggaacggctgtcagaagattttcgcagatttcattggagttggggaggtcaggggccagtggtggctcaaagtcacccaatgaatggctgtcctggtcacagggccgcacccctggcccctcacgaggggaatgtgtgtagcagagggggtgctgaccatgctggaactgcggcgactacagagcctgcgggaacctcccctttcgcccaagatctgctctgtccccctcatcctcctcccagggccctggcgtctgggtcaagcagcgccccacacctcgacccctcaccccctcctcccgggctcttcctgcggcctcccctccacagtccgcaggctctgggacaggaccgagtccttggctgcctgtggagctcctgtgccagcagctgcgccccggctgcgctccggatacccccatccccgccaccgccgacctcccgctccaccgactgctgctcacgcccgacgggttcacgccgcccctgccccgtgaaggaccgcgctgcggtgcggaggtaggtcaaaagccggggccgcacctggcttcctctgcagtccccttcctggagtgtcatccctgggtgggggtccctcctacgctcctccaactgtgcggaggcagctcggggtgcgtgcggaaggaggcccgggggccgccgggagtggggtgccgcctcacctgcgctcctcgggacctgcgagcgggcggcgggagggctggggcgctggctggagaagtgggttgagagttggagggggaggcggggaggggaggcgggggtggggctgaacttcagcccctcgggttcatgacaggctgcagggcctggggtccgtctggggttctcctgctgcgcgagggtcactgggctctggggagctgggagggtccgcgggcggacggccctgggaaagcccgtggggtcgttctcgcctccagccccgcccggccagggccggcgtgcaagtgtgcgcgagtgggagcgcagggggcgcgcgggggctcggtcttctcccgcccggtccgctcctccgggcggaaccccctttgccgggcccccgggccgcagctggtttcgggaaaccgcgcagcctgggcggggccgcagcccccacccgtgcatctgccgtctccgccctcccgtcgctcccctgctcggggtcagctagtgtccgctctgctcggccgcgggctcccggaggactgcaggtgaggcagggcctccgcggcccgggagaccctcttgccgcaggaccctctgtcacgaggagtccccagggccatgcccccaccccgtcctgtccacaggacgtctttcttcctccaacctggtttccaggaggactcacgtaggagggagggacagctgggtgcaggtgtttctccccagaaaaacggctggagagcgggaggagaggcctggggctggcgcgtcccgtccaccttctgccgcctgcacgcctggaccctggctggagccctacggtggggtggctcctgggacggggccagggagcggcggggctgccggacgctttccccagccccggggcacgggaagagctggacagaggaaagtgttcggggcagccgggaagagcccaccacctaccaggcgtcgggcggcccgcaggggaatctccgtggtgccggcctggttcagatccgactcttcaggcgggggcgaggcagatctaggggttggcgtggggcgggggaagcggtggtcctgggggcccggaggtagctggaacccgaggtgccctcagggcgaggcctgggccgtcaagggaaggtctggctggaatctggggctgggctggaagcagtctgaagctcctttgtacgtgtgcggaattgtctaactcctgtcctttctaaccccaaggaggccaggtgggtgaaagagtgaaactgctttgaaaagtaggtagagtacgaatgggaggtgttattagaattgttaataatatttgatttaaactgtgatacttagccaggatgtccattagaattgcctatgcaggatttattttagagccaggcaagctgattctaaagtgcatgtgaagaagtagtctagcaaaaatggccatgacaattctgaaagaaaaaccacacgaggggatcatgaaacagcccaattagcattaagctccatgttaaaattgtggtaatgatgcctagcccatgagacatgccaatgggcagaatataaggactagaataggcctacattcctaggggaacttcatttctgctcaggagagaattttaaatcactgagaaaaagaggatgtattttccgcaaatggaacgtatctttcagaagttaaacatctgaatgacagcaacagaacttggatccgtgtctcccaacggcgaaggttggtcacccagctcccaaattccagatggtcggcatttaaaagtgaaaactgaaagcataaaggcacttagaagaaaatgtggaagattattttataatctcgaaacggggaagtcctttaaaagtgtaagagctagacaccataaatagaatgaaatagaacatggattgtatgaatatacaagcaaggtcaaaaaataaacttcaaattgtaaagaaacatttgaaactcatatcacaaacggtaattttgtgaatagataaagaacttccatagaaaaaagcaaaacaaaacaaaacgaaacaaggacataggatgtgaacggagagctcacaaaagaagaaataaaaatggccctgaacatatgaaaagacaaccaacctcactcataataagagaactatgggccaggcgtggtggctcacacctgtaattgcagcactttgggaggctgaggtgggaggattgcttgagtccaggagtttgagaccaccctgggcaacaaagcaacaccccatctctctctctaaaaaaagagaactggccgggcgcggtggctcacgcctgtaatctcagcactttgggaggccgaggcgggcggatcatgaggtcaggagatcgagaccatcctggctaacacggtgaaaccccgtctctactaaaaatacaaaaaattagctgggcttgatggcgggcgcctgtagttactcgggaggctgaggcaggagaatggcgtgaacccgggaggtggagctggcagtgagccgagatcgcgccaccctagcctgggcgacagagcgagactccatctcaaaaaatgaataaataaataaatacataataaaaaaatgaaataaaagaaaaccatggattaaaaatatatggaaatcattacagaaagcaggtcagtggttgctcatggccagtggttgggggtattttctggggaggggctttagggaatgtattgctgtgtaggaatgtcctttatcttgattgtagctgtaattgcacaaatgtgtaaatttgtcaaaactcgttgagatatacatttaaaatgggacatttttattacataaaattgattaaaatcaatgcatttttccccatataaaaggaaaaagataaaagagtttgcctcctgcatgtgaattgctaccacctccgtggaggataactgacaatatctactaaaattgcaaatgcgcattcctggtgccctgccaattccacattgtctgtaatggaaaaggattagaaataacctaaatgtctgccaatagggaaccacttaaataaattatgaggaattcatactctcaaaatatatgcagttacacaaatgagtgaagaagcttttgtgaaagttgtcagaatcataatcgagtcacttgagttaaaaaaaaaatctgaaaatggaaggcccacaaggcagggttctcatgcgtaaataacctgggaacaaaagtcatcacaaaggactctgtaaaatgacaaccttacacaaaaaaatacttctgtgaggacatccaccagcaactgcctgtctaaccctggacttgtgtcacccttgttattgatccttgtagccaaggatgatcacctcaaagagattatgtaagtctccccatttttcctttaaaaacctttgtcttcctttacctccctgaacgtgcacatgatttactatggtaagcatattctcattgcaatgccctattccagaatcaatctcattttcttttggagagcctctctctgttatttaggttgacactttttatggactcatgtaggattattctaaaaacatatgatcgtgtgatcacagcatcatgcaaatcagtgtgtatagtatgctgctatttgtgggaaaagggggcagaaatactttttcacacttttgtatgcaaaaatgtcatggtaggatttataagagactgataatattactttgcatctgcaaggcaaataggtggttgagggaaaaagatgagcgataaggttttaaaggtatatatacccttttgtatctcttaacttttttatgtgtaaaatcactattgatttccagtgccattgatatctgcactgggaagcccctttgaattttgacaaagacactgttttttgtttgtttgtttgtttgtttttgttttttttgagatggagtctcactctgttgcccaggctggagtgcagtggcaagatctgagctcactgcaacctcagcctcccaggttgaagtgattctcctgcctcagcctcctgagtagctgggactacaggtgcacaccaccgtgcggatttttgtatttttagtagagagggagttttgccacattggccaggctggtcttgaactcctgacctcaggtaatccacccacctcagcctcccaaagcactgggattacaggcgtgagctattgtgcccagctgggatcttgacaaagacactatttctctcctttcacctgtgctgtgtatttttccctcgcctagttcccagacctcactgctatatgtcttctccctggcaggcaggatgacgcaaaacacggtgattgtgaatggagttgctatggcctctaggccatcccagcccacccacgtcaacgtccacatccaccaggagtcagctttgacacaactgctgaaagctggaggttctctgaagaagtttctttttcaccctggggacactgtgccttccacagccaggattggttatgagcagctggctctaggggtaagactggggtggtgcggggttggggggcacgttaacgaggtgatgaggtcaattaaaatatagagccaaatcttcaaaattaaaacgttttatttgggaggagagaattgcaatttggggcatacacacagaccaggtggtctccagtatgtctttagaacaaagagaaggttagaggcttataaaaaggagaaatgttacatattgcccttcatgaaagatcataggttttggggagctggtgagctctgatgggtgagcgatggcatgagtaaaactaatcctagagttgtagcaaggtcagaagctgtagataaagctggtttcaggttgcagcaggcagcttcagcagcctgatttgtagagaattacattttgggagcaacattttgtgccccgagtgctttttgcccctggcctctcgactctgttttagttgagtgtgacaagaatgaccccatttgtaggctcagctttcacagtggaaactctccttcttcaataggatgcaaaagaggaaagtgggttgaattcccatgagagggacatgagaaatcactatttatatctcattctgtgtaggaaaaagttgtaagtgtccccacagaaatttggatggaaaggaagaatcgacctcctctttggcacagaggagtcggtcccagccagaggtagggcaacaggaagaacagtctagaggctgttaattcggttttattgaccccacatggactgaaagcctacaggtgcaaggcaatgtgttcagcacttcaggccaagctacagagagaatccctgggctatatctaaaagtactcagtgaccatcagaaggaacagcagctacactaatgactggaactaaaggtagatcaggtgagggagaagcacatctgacatccttgagggcaggagaaccctgaatggagaaggaataggtatagacagaggtggaagatggacaaaaaagaattccaggttaaagaatggcaggagcaaaggcaaagaggccagaaggcatagggcaagttctataatggttaagagtaaagggaatgggcttcatgaatgggtgatttgggcccatattgctgagagccttgaacgaccaggtgaggagtctgtcctgaatcagctttgacagtgagaacgctgtcaatggattctgagcaggaacctgcctcagagtcaggaggcatccaggtgagaaggatcgaggatctgcactcacataatcatagcagaaatggtgaggagacaaaggagtccctgtccttcacagacctccatggcatgggagtgaaggggtttggggcataaggaaagagaggcattcacagcatgcagagagggttgaagtgtgggtgaccaggagatcggagccctgaaagtcaggaggagcagccattcgagaggtgtgtgtgtgtgtgtgtgtgtgtgtgtgtgtgtgtgtgtggtagtaggggatttggatgtgacaaatccgagatgctggtaggatgtggaggtggtgacagttgggttttccaggaagaagaggagttctcttctgagtcggagttgggtgtgtgaacggcttattggggtatgacacctatgaaatgaaaagagggggagcaggattgagcaggaggaaccatcaggctgcaatgcagactctgccaggccagtgggggagctcccaggcaaaggttgcccactgcaggagttccacactgggtggagatggcccttgagccactgtcttgcttaatcattggctggggggccctcctcagtgtgtgtcttcagcttgaaaaattagggtgaccctgaaggagctgacaactgcaggctgtcagcaatcaaacaagccctttcttgaaggaggtctcagcggcacttctttgtgtctgccacagagccctcaagagtgtgtgtttggatctgaagagaaaggataggccagaagctcaggtcaggctgggggtttggatgggacaatgggacctctgaaggagaatggggggggaaaagtgggaatcttcaggtgggatgagaaagtgttgaagttgggaaaaattgatgaaggataaatagccaagcctatgagaagggtgaggggagacccaggccagtgctgcttcatggattttaaggggacagaatcttccagaatcagagctgcagagaggtcaaggcagaggaaaaggagaggagagccacctaggtaggagccaggcagctggtcccagggcagccggggcatgtggactcacgggaaggggtctggtttctcatcctgtcttgcaggtgactcagatattgctgggggttgtgagttgtgttcttggagtgtgtctcagcttggggccctggactgtgctgagtgcctcaggctgtgccttctgggcggggtctgtggtgagtaaggaacaggctgtgagcctggagggaggcaagtggtgatgggcaagaaggcgcttatggatcttggttggggctttggggaagcgaccaaagtctctggagccaaatggcctttggccatgaggaggctgctctggggtgtagctaaaaccctgtcacttccatttttctcttgaagacagatgggaggggtggggcaggtataggtggaatcctggtctgtgtgtcagagttctttgtctgtccctgggatcctgcttcacattggctattctgggaactgctggtgggagggtgatgatagaccaattcagaagagtaaactggaggcctttttctggtgtctcttttcaggtgatcgcagcaggagctggggccattgtccatgagaagcacccgggcaaacttgctgtgagtcttggacaccctctctccaccttgttcactgaccccctcctgaattctgctccattatctgtcttctgccctttggttgtcaatatcttggggtctttcttggaggggaggagagggtttcctggacaagggctggggaagaggagagggatttgaggcggggacctcatgactcttccaccgattgaaggagcgtgtgtcatgaccctctttctcttccagggctatatatccagcctgctcaccctggcaggctttgctacagctatggctgctgttgtcctctgcgtgaatagcttcatctggcaaactgaaccctttttatacatcgacactgtgtgtgatcgctcagaccctgtcttccctaccactgggtacagatggatgcggcgaagtcaagagaaccaatggcagaaggaggagtgtagagcttacatgcagatgctgagggtgagcaggaagagtccagtcttcggggacccatcacagctcttttttcccagggagctgggggccctggaggacagagatgtaggctctttgagcttggacttcatgctgggtctttcattcaggaggttttaatgtaagctacagacatttttcagacctcatgacacgaagattctctgaatcaaggagggtgaggaacaaagaggagacatttcagagaggagatagtgggtcacccttctggcttttctggtgtgttggtatcacagttttccattactgaattaaaaaccacaccaaaatgtagtggcttaaaatgacaacttattatttctcacggtgctgtgagttggctggattcagatgagccattctcactcacgggttttctcatgcagttacagtcagatgggggtgaagttatccaagtgctcgccgaggctggaggtctgagatgatgtagttgcatggtccggagctcagcgggggctgtcagcaagagccggcaatggcttctccacttggcttgggcttctcatagcacagaaactggattccaatggggagtaccctagttgcaagcatttcaggagacagaaagtagaagctgccagaccagctaagggcttccctgtcactgtatagtgtcactttcactgtggccaaagcagttctaggcccttccagattctacgggttgaaggaatagtctccacttcttgacagggagtgataagttcactctgcagacaagccaacgggatggaagctgtggctggaaacacagtcagctgtggtgggagcagcaagctggatagagtcagtgcctgggtgggtggagagggtggtgatgtgggcagcattggagtagctgacacctgactatctttgttcttcccttatctccagaagttgttcacagcaatccgtgccctgttcctggctgtctgtgtcttgaaggtcattgtgtccttggtttccttgggagtaggtcttcgaaacttgtgtggccagagctcccagcccctggtgagttgtcggggaggggcctctgggcagcgtgagtctgggtggtgagtgtgtgggacaggtaggagtgcggggccaggggcacccgaacctgaggctgggcctggtgcccctcagcttctttccatatgcagctctcccctttgctgtctggggaatgtggccatcaccatggtcctgggccaactgtcgccgccctgtgcctctctgcgccctcctctgctctgatctccccactctcccctctgccctgtcccaggtgttcgtctgactccccttcctctgccaccttgttttttttttgcctgatctgcttttcctgtcaccttttcctttccctcctcctttcctctttctgctttctgagttctatgatactaactctgcctgcatccttttcccctaaggatttcttttttcttttttttccagaatgaggaaggatcagagaagaggctactgggggagaattcagtgcccccttcgccctctagggagcagacctccactgccattgtcctgtgagctgccaaagaccccacggggtgcccgcatgtccctgtctagggcagcccagggcccccactcctggctcctcacacttgcctcccctatggccgctctccagaccctcctcctttcttctccccacatccgcacctgctgttcccactctggggttctcaagtccatgaacagatattgttgcattttccacaatgctgattaaacataataaacaatccagaaaagcagttttgcccagaaagatatggtttccctttgtttatacacctcgtgcgccatgaaaggcctttctttgtgtcgctatgtatgaggttaaatgggagctgatttatcccattaaaacactgtcccaagaagattaaatttaattatgttctgctgtacatccaggtggcaaaacccctttttatgattttcttcaattcagtgtaaagtgtaagtcta

SEQ ID NO: 819 - DNA, 481 bp, Homo sapiens
ctggttcaaatggactattttatccatttatatttattgcagttactcataaacttaatttataatcatcatcttttttttgctttctatttatttgtctcactttaaaaaatatagtcatgctgatcatttaagggtttagttgaaggtaaatttctccagcagaatttgcatttgtttctgacaggtgtcaggggtcactaccatcttgagaacctttaaattattttctcagggtttgggggtttatccaaggagtgggaattccatccataagtccatgttagggccggcttgtattcacgaatcttcatctgactcctttcaccaagagtttacttgtcatctccctcaaaggagtggattttttcccaaatgtcctctgaaagtgaagatttatactgggtccttcactgtaactctccagcttaagtggctctaggcttcatttactgtctttcacatagttattaagtgcagt

SEQ ID NO: 820 - DNA, 488 bp, Homo sapiens
tccttcctttcattgtaaatgatagcaaactgattttgactttttccattttctttatatatgaagatataacataaatatatagatgtaagcatttctgaagggcaggaaagctggtaggggctttatgaaatctccatgaggccagtttcatgacttagcagccccacagggctggtcttcagatccaaggcgatgggctgcagggcctgcaccttccctcttggcagagcggtgccacagaggtgcagagctgctgcgctgggcaagacctgctcctgcacaggacttggagtaggggcctgtgccgagggcggtgctgctcttcctggggccctcaccagcctgtgctttacatagaggcttgtaaagaagcctgcgagacaggagtgtgttcagaatatggacagggtcagccgattacagcctgaggggtaaatccagcctgccattgaattttgtaaataaaaatgtatctaaacacaacc

SEQ ID NO: 821 - DNA, 574 bp, Homo sapiens
tacacttaggagattctaaatatgtggcttgatttgagggcagaggctgcttataatctgcccatggtaagcctgtgatctcattagtgagttgatagacatttacaaacagtcaaattgcctatcatctcatgcattgtggacattctgtcagatccttagctcaaattaggcttcatattcatttagatatattgtgattctgccttggaaaatctttcaacaggcagacttagatttgatttatttcagtaaaacatcttctactttgtggcttgtttcatttctattccactataatgatatttccctgaataacatagcaagtgatttagtggttttgtaaacctgcactatgtaataatgcatgatttggggtacaatatgctggattttatcacttggcaaaatgagagaaatgagacagaagtcaagaatttccatgcatttctttcaaaatttaaatgatgagttttccaattaaattttcttgtgatatagtctcacgttaatgctgaaatgttaaaaaaagaagactctttaacactgctgaacttgtaaagtcatttgagta

SEQ ID NO: 822 - DNA, 574 bp, Homo sapiens; identical to SEQ ID NO: 821

SEQ ID NO: 823 - DNA, 15558 bp, Homo sapiens
gtttctaggactattcttgataagaaagagctcttggagtttgctcaacttggctgctacttggaatatgatctctttggtactgaactacttcattaccaactcggcccagatattgacatgcctgatgataacaaaagaattagaaggtaaatatggtaaagcctctcatagcattccctttccctagccctttttgattgtcatatctagggaagtattagcaaagattcagaaaacagtaagcaggccgaaccacagacttgcagagaaaaatatatctatgctgtttcagggagaaaaatctctctatattattttaaggagaaaatgagtcatcctaagtaggctaaagcttagcagagccttagaagttcagtgcagatgggcagctgacaggaaacacagataatacccaacccctgccatgaaaatcagagaacaaaagacattttcctctatttacccctaatgaaataagctgttcctctctcaggttgaccacactaaagccataacttcctacaagtaatatttgaaatgctttatcaaaagttttcattaaaaaggtgatttcaagttaaatgctaaaagtataaggtctaaagactaaatattatgtaaaatgaatgcaaccttccaaaactgtataatgtgtgatgctggcagataattgtaggagtcattctttgtaatcaagtagaaaattttaggcgtcaatgatagctacctagtttggtcttggtcacatggtgataagaagattgaatgaaccaagttagaatacctaggaggagaaataaattggagattgacaaggaaggctttcgtttgggaatatctaagtgttgctacccagtgaagccctaagatatggtttgtatgtgatagttgaaccgtgggaatgaatgacatcactcagagaagaagatgaggacagagacctggggacagagacatttaaggaatggagtaggaaccgtttctcaaggaaaggtcgaggagaagttttcaaagtgataacatgagagatatatattcttatggaagtcagtagagaggaagtctcagggcagaagggcttgaatgccggtaataagtgacaaatatcaagggaaataaagactgaaaagcatccattggatttcacaattaggaggctcacattttataaacagagtgcaatctcagtggaaaaggcttgagaaatgggtgggccgtgaggaagaggagagaggatgttgaggtgactctttcaagaagcgtggcagtggagggaagcaaggagatgggtctggagttacaagtcaataaaggatcaagggaagcttctagtaagagttgagcaatgtttatgtgacttaagagcaaaagcagagacagagccagagagaatgagtccagggaagtggtgcccattccacagggttactatagaattgacatgaaataatgttttccaagtttttgtctgagtgtctggtgcagaatatggaagtgttcaatagatgttgactttaaaaactctggatagataagaaatatagagcaaggttcctaaggcaacaaatagatggaatctggggaacaaatagaaagtcggttgaaaggatgctttctccatggaaatgagagggcatgacacagcgatggggtgaatgcaaacagaagtcttagtgagggaaacaggagactgaggacacatggccacatgtcctctagtgtctctgtgaggtggacatggttatctcctgagaaaaaaagagtggatttagggcagcactgtgtagagcaggagaaaggctaggaatggctgtcaggtcaatgagagagatcttgacatggatgtgttatgtgcgagacctagttgagtctagaaatcatgattgcatgcctgtgtattggcaccaatgcacacgatttggtgattattttccaaagcaaaactgttttgcgttttggtagtggaaccagagaagttgtgtgcgtacaagcagaaaatgggaacagttcaagagattgagggttgggattctatctgaaagagatggataacaatggaggagttgagatgagggtcatgggatccaagttggagggaagaaagcatagagaggaatggtcagatagacaggaaaagcatagcagggcaaataagtggactgcaggctttaatgaagtgggtggagcatatatatatatatatatatgttcaaatatatatactgtatgtgtatgtgtatatatatatgtgtgtgtgtatatatatacacagtagaagaagtgagtggaaaaagtagaaaaatgtaacatgatcggagtgggaaactgaagatggagatttcagagggggagcagtagttccctatgataacaagaactagaatataattatgagaacagaaaagtggttgccgtggaagtagcaaagctggaattgagaagtgatgtccaggaaccatgagattcaagtattgctagttgaataaggcacactgggttgaggggaagatcttgagccagtggtcatagttgggacatcctgaggatctttccctgggaagtcacatttacgtctgtatgccttctgctgtctccaagtactggcattctgccttgatcacctcattaatagtactatgcttcaagtttagtatcattagggaaagctagttaatcagtgttgcattagttaagtaagatggcaactctcaactctacatgagcaaatgacttcacctgtcttgaccaatgaaggtctgtcttttaatactcagatcagttatttggacaagcaaaaggatggtttcgttgtttatttttgttttattattttaatttacttgcccaggaacccgattcaatacaggtgaacctgttcccctaaagccctagtagttagtttatactcagaggagactattccttgcctaagggcatctggaatttaaaatagtgcagtgcattcagtcattctcatctttcacaatctcaaaaacatgatttcctgatcaatgccctcaacatatgttttatttcttttttctttttttctttttcttttttttttttttttgagatggagacttgctctgtcgcccaggcaggagcgcagtggcgcaatctcacctcactgcaagctctgcctcccaggttcacgccattctcctacctcagcctcccgagtagctgggactacaggcacccgccaccacgcccggctaattttttgtatttttagtagagacggggtttcaccgtgttagccaggatggtcttgatctcctgacctcgtgatccgcccgcctcggcctcctaaagtgctgggattacatgtgtgagccaccgcgcccggcctcaacacatgttttctaaatcatcttggaaatgggaactttgcactctggatcggcttccttttccgaagcccctttgtggtagtgaggtgcatcttttgcacacctgtgtctcgcatgaggctcccagaccttctagaacaagagaaagaagatccgtaaaggggcatctgtgaaggagatagaagggtcagatgaccgatggctcccccagcattccttcttagctccttttagccatttgtttaccctttactgtgctaaatatagctattctggatgtatggaaataataaaaattattataatataaatctgtgtatatatatataaaatacctgtgtgctattccatacgtacgtgtatgtgtgtgtgcttaatcttccttaaattaaaccatgcattctcgcttgacccaaggacagcccatgttaagcactgaatgcccttttgggttgcgtgtgctccagtacccactgtcttgcacacttgattttcatcatgcatgaaaggaccacagggtccttttctgagccatcgtagtcttaaaccttgaagtgcatgaacacagaagcacgcttctgcctacctctggtgttcagcaccagaaattctgtgtctaacacctgttttcaatcttctgctccatttctcaaatcttattatatctctgccttttcacactttgtagtctctctctaatatttgtttgcaaacactaactcatttgtatttctataattaccgtgattttttgtcttctcgtctgtagtggctcccccttttctggcagcatctctgtaactcctgttcttccatataatggcacaacaggagagatgatcttttagtgtaagcaggacggggcaggttttcttcatagtcaggatatgattgtgtgtccagagccataacgttatctttctcataagtagtctccagattcttgacttaatgggttctaaggattcccggttttaagtatgagtatcttgtcctctatactctttcattctacttcatgatttgataacattgtgtttcaaggtctgacaaaggacatcttaaaggaatttgtttatccacatgatctgcctttatagtgtgagaaattatatttatcagataagaaacataggcaaaaattttggaaaatgcccagaaaatatcagggagaaagtgtttcctaaaacctcctataccgtgatacttctttgcagttgtggatcaaggtttgtcaccctaagcttcagtattgtgtgtgcattctgtcaaatctttgtctttttatgtgataatataacttatcttagataattcccctaaactgagtgtgttccaaaagtaactgcagatcagaacttcaggatagtatacaaatttcaatgaggcaaaaaatcatagtggcacaaaagtcattacatgcacttataggacaggcatggttcttctctgctagtgcttgcattcctttgacctgcagatacaaagtctattcttccattataatttattttaaaatatgtgttctcagagggcagggctttgtgcttgagttttttttgtgtgtgtagtaccccacgttttgctcactgtagtagttattaaatatgactcatgtactaggacaccaagaaatgcttttgaaacaaaaaagatacctttcaaataatcagcctctggaggaaggcactgtccgtccgtctagatccactttagaatctagacgccaaaaaaactattcagagaatcccatagaagagccattgtctgtgagtggcatcttctaccatcaaagacccatggaagtcacgacagacactgcccagagtccagacacgtacagatggtggctgtcaggaggtgactcacactacagattccagcatttaacaaagcaaagaggatttcatttttagagaatagtcaggaagctgttctttagtccactgactataaatttaaaggaacagcttattattttagcaatcttgctgacatggaaagaagacagaatatatttgtattggtcagtttaatccaatgctcagaggctacaactaaatcaaaattgccatagacttcaaaggggcaaatggttaaaatgctgaccaaccttttttcagtggctttgtagcttatcaaatgcccctcacttgcagaccaactgattttgctctcagaatattttacttgtagtgagattccttttgtttccctattttaatcgcaaacagtccttgatattttttggccagataaaaggagagagcaagaatgagatctgaaaaatgggcccacagggagaggcatttgagagaggattgctgaatacaaatccagaacaaagttatttagtgaaatgccaaaatggtcattcatccaaactggcacatcctattagaagctatctttaatgcggtattgccaggcatggtcataaatgtcacaggttagaaatttctgtatgcatggaataaggatatgttcctgctaggatgcagcaatatttttatcgtcaccacacaatatttattaaaggtctctcagtacacacgccacagtagaagtcagtatctttacgacaagcacaataggttaatgagtaaaaagttgaaagcatcctgaaaagcgaaaatgaaagacaaatgacatctaatgagttaacatttttcacagggtgcgtctcctggtggaagagggctgtgaagatcgaattctggtagcacatgacatacatacgaaaacccggctgatgaaatatggaggtcacggctattctcatatactcaccaatgttgttcctaaaatgttgctgagaggcataactgagaatgtgcttgataagattctaatagagaaccctaagcaatggctaactttcaaataggatggttgcttatgaattcacaccttgagtataaaacttgcagagaacattcagcgatttccagtccactgtgagatattaatcagttacctaggactaatgacagatcatttccttctgatgagaactaggagggtttgccttctctgagaccagctattacaactgtgcctctagggagttactcagcctaattgagccctattattttaacttaacaaaataaatacagaagtacctatttctaaacaatgatttaaagtctatatcccctaagcggagttgttgtttttctccctaatctatcagctgcactacttgagaaaatttaaagtgtttctagttaaattatttccttcttgagcgatctaatgtttcttgtaatattgatgatcctactaattatcctgctgttctttaattaatgcttaatgaataatatggcactgtaaaatagcttctgcaacaagggaagttaaattttgagacttttttccccaaaggatactgactgtaatacaattaccaattcacaatgataaaaatattttgaaaggttaattttatactgtccacctatctatatattcttctactgaaatgattttgatatctttggctttccggtatctatttttgccatacattttgctgttttgcaaagtttgtataagaacacataacactactgaattataaaaattcaatcataaaagtcaaaatatattacataatatagtttaatgaatcattacatttataataacaaaggccacaatttaattaattggtaagatataatgcaaaaaaaaaaagagaaatgtttgccttatgtatattccctttatttcctttaccttttgtttttccttggacctaaacagagaaaataatgcttatgtatctgaagaaaaggtcagatctattggaaatgacagcccgatacttgagcctcctctttaaaaggtatccagccctgatattttgtgtaaataaaatgtttttaaaacctgttagttaaaacacttaggtgatgggcactgctgcttataaattcatcttttggttgaatcctcactatgctatttggtacctaaaaatattctccaaacccttgctgccagttcctctttgataaatatatagttaattcgaaataaaatccattgcaattcatttatgagttatcttacatatcacaaagaccaattagaattagtcattattcttgatgaagagtctgtttttaatcataaaaatcatgacagttactcagacccaggcatttcaacagagctaacaccaccttcagataggcacaccatgcataactcttgggaagttgagctttgctaaataaaagatatttctgctgatcaaagatgatcaagctttctgtgtattggaacagaaagtaacaaagaggaatgagccaggagaacaaactaattcctttaaataaataaaaaaaaaaaatgcaaatgtccttcaccagtaaagcaagcaaatttttaaaatctctgtttttgaaatctactcgtcaaagagttttcagaggcaatgaaaggggaacagatttttcattgtaatagtggaagttgtgtgatagttaggagatatcaacatgcatttttaatcttttccttagatgaaagagatggcttttggcagtgtgttctaaccagaaagaaaggatttgtattactctccaaatctactgtactgtcagcttcactccacctgagaaaaaagaaaaaaaaattgatagctcaaatgcatgtaattcataaacactgcaaaggagagccacttggtgtctgcagtcctcatattaacagtctgtcacagaatgcagttaaagtattgattggcatatggtaatagagcaaccatagccttaacttacagacctgtgaaataaagggcattttgacctaatacaattaattttctggataactcttaaagagaagtcattttaactgtttttgctactccatatattgtcattcaaaatatattttaacccaaaataagttaaataatttgtgcatgtttgtgtgtgtatatatgcatacacttttttatattaaaattttgaggctatacagccactgtgccctgtggaataaagccatatatataaatgttttatatgtatatgttttatacataaataaaacatttcatctaatatatatatgtgtgtgtgagtatatgtgtgcatgtttagcagatatttgtataaaatataaacactctgttgtcatataggctatatgcgaaattgttaattttaaaataacctcaggccacagacttgtagtaatcatttgaaggcctcacctagtgtccccttggtgacgtatgcagcagctcaaattaaacctttgtgcattgggttatgaataatcttttcttccaaagatggcaaaagcctcggtttgatttgatactaaagaataaatttctctgactttcccagtgaatctaaatgtattcagttgacaaaatggacacataagggctttttctaaataccgtacataattacacattttcacacttagagggtaatcctatgatacactgtcaatctctatttttaaagactatcaccagaaaagagagaaaagaaaattcatataagaaaaagaaaatgtgaaaaagatcataggcttgggaattccctcaaatccagaaaattccaggttaaggcttgaagttgaatcattcccaggtctagctctaaggttaacaagagtacaaggcaaacaatttctttggggacaagcagcattatttcaattagaccttctcctgcagggcaaaaatcattcttccccacactatgaatggactccaagtatcataataagcaggtaaactcacaagaaccaaagctgacatatggataaaagcagcaagatcacagtacaccaaagtatcatatatatagaagaaataattcaatgtcttagatttgtctataaaaatttgtgatctatataggacttcattcacatggacactaacgataaggagtatttgctttggcggtagtggatcacacatctgcttatcttgctttgatattttttacataatgtttctgagtgatacagatgtgagtcaggtagcatttgatttccccacatatacacaactgaggtgccctgccattggcatcccctgggatccttgattcactgacgttagccatacgaatccagtgttcaaactcagaataataagcttagtttctgcattatcagtcagcataaataataaatccagaaacgtgctgtatttgttgttgtttcctccatgggctttcccgccatctaatttgatatagacttcatctcccggctccaaatgaagaaccacactgttactggcatagtcgtaattctgatcagcatcttgggcaattgcactagcacgcacctatgtgaaacagacaagaattaggatgcgtaaatgagaattctcaagttttcttttttgccattcatgtagcatcacaagctgacttgctgccatagtacagaatttagcatagcaaagtccatgttgacctcagagctttatgaggatagtgctgtggcagtttccgctacgttagtgagaaggaggacagaaagggacaaaatagtgcttcagtggggaccattctggcagtcttatctaactacacattctaaactatgcatacaatttattatcttcctgtatcactcgtttttctaactccttcgatccctatgcccaatcacattttgaaatgaaactaatagtattttttgcattttaatttaagccagatagcaatattctaatcagctgtttatgagtacagaagttcaagtctaagttcagctgttcaccacaattattagaaaattgaggtatgtaatagctaaaaatacccaggaaaataccaactcctctactacttacaaagaaaaaaaaaaaaaagaaaaagtcttttgatttagggctttccaaatctaattcatgtaaagccccctttaccaggctgcttcagaagcttagctcatttatacatctttgattatatcacctgagttttcagagttcttttttccatcgtgtctttttattacttaactatgacatgtgcatttaaatcaagaatttaacctcaacatatctaaaagttaaagaaaggactaaattttcatgctctgaggcctctcaagtttcaagaatttttgaatgatttcgttgaatatccacttacacttaggagattctaaatatgtggcttgatttgagggcagaggctgcttataatctgcccatggtaagcctgtgatctcattagtgagttgatagacatttacaaacagtcaaattgcctatcatctcatgcattgtggacattctgtcagatccttagctcaaattaggcttcatattcatttagatatattgtgattctgccttggaaaatctttcaacaggcagacttagatttgatttatttcagtaaaacatcttctactttgtggcttgtttcatttctattccactataatgatatttccctgaataacatagcaagtgatttagtggttttgtaaacctgcactatgtaataatgcatgatttggggtacaatatgctggattttatcacttggcaaaatgagagaaatgagacagaagtcaagaatttccatgcatttctttcaaaatttaaatgatgagttttccaattaaattttcttgtgatatagtctcacgttaatgctgaaatgttaaaaaaagaagactctttaacactgctgaacttgtaaagtcatttgagtagtatctttaaagtgtctttctgggtatcacatagcaaaaggagaaaatggcttaaaggatttagaattgcttaacgctgtactaacaggcactaatataatgaaagcaatataccatgtaattatgcttggaagcactgactccaatatatatgccaatttagtaaagtggtccgttttgaccattaaataatgacgcagtttgacttcataatattttctaaagattaatcatgagtttgtaggagttgaatgctttgattcattaatttcatctagccattaattcccagggaaacaaatctacaagaaggatattgctattatgacttgtgtttttttctcatctttggatttttaatggtgaaaaaaattaaaaacaaaatattcatgagctatattagtaatacattagttatcaacccataatatactcctcagctattactaataaccagacatattttattcagtgctttgggtatttaggacatgttctatggttactgggctttaacatggttttctacatgaaggtattggagaaacaggacatactaaaattacttgatttagacacaataatccttttaaaaatataatgccatttttattctccagggtgtaaccacaaaaccgagtgaacgtcaccatttttattcagtaggcgtaaccacaaattcctgcgaatgcattagagtgattccacagactgaaaggttaccctcacagtttctaccacctttgttggatcaagccagtgtggttgctttttaatgaatgtaattctgtaagattttaacctatactgtaccgtaagactgtcccaattaaataattgccatactccagtgtacctggcatgattttggtatggctgctcacctgatcctactctaaagatataacaggacttgaaatttcaagctctagtattcagctcagtgacttcaacaattctttcaagccatcaaactattgaggaaggcaatgtgttcaccctggaggctgtttccagattcctaaatgtacagtgatttcagcattctgtctgggaataagatccatccttccttcagcgcaatcaaccgatttctacctgaatttactctaatatcttttcttattacaagataactatttagattctgctttatgtttagtccgtatttctttaaccctaaaaagattatgaatttgacatgtcattgatctctctaataagcgaataccaacccacaaaccactcatccttttaaaaatatttcatgggcatcggtgccataactaataaatttttaagagtaccaactggtctttaattattttatgcttttaatcctgaaacagtattagttttcattcgagtggcttatttattatagtggcattagagtgattgtattcaaatagcaatttttcttcatgttttctgctaaaaggattatcaacattaaagagatttcctctttccaaatgtaaagctatttgagttgaacttttacctttaatatgcactgtcatgggctttcaacaaatggtaggattaaatttaggttgatggcttcatggggagtatgagagctgcggtcattttagggatatgtttctgtgtctgcaataggtttcatagttttagcattatcttattagtgaggatctatcattagagatcatatttatggtgacatttgtaatttaattaattgctactgatgttctcgtaatttcattttcattgtacttctgtggaatcataaacaaaaggttaagtggcacatcaggttaatttactggtctttgatgtttccatctgtgatcttacattctacacaaagtataaataaaatggctctcatatggttacagtccagaagcatttctctctcttagagggaactgcatttttagtttaatttttgtgcttctcaaaatccacttaatccatagaacattacactgacatggatctctgagtttctgttttatgaaaaattaagtcagctcagagagggaacctgccattctaagaagtgatcagaccagaatataattgaaaagcaagagtgaagtattatttaaaattaataaaaagattttaaaagatttctcatttgtaactgcctgcagactggacttgacaaaatagttctaatctagagataaaattccttaactgtagtagtgtagtaaccattttccaaaatagtccacactgaactaaaaaaaaatgtttaccactatagatttatttttctgaattacctgttgcataccttttgcagaagtagcagcttaatattaccaatgaaaagacttatacattataaggtcagctgttttaccttactatttttcctgatcctcatggaatgtgtgtgctagtgtgatacaaaggaagattttacaccccaaacagtgaaataattttaaaaacaaaacgcacatagaacacctacatggtgttattttcttcaaatcagtgtaatatacacaggctcagcagtctagacatcaacatttaaactaatttaaatgtattaatcccttcttttttcatgcaattgcaatttccagatatttaaagatgtgagcatttttacacatttgctgataaaattggaatcatttcattttaattgatacctctaaaaatcatctcttcagcccgattgtattttccagacctgacctttgagtcagaagagagccaatttgcaaataaaggggtgtctcatggctgcctgctgagggactgttcataagcctttttgtgagggtgattcaatagctccattctggtacagtgagtcctgcccgttttagccatttgcctataactgttttactgttctgtgaataatttttatttatcttaatattattttcatgcataataactataataaacaaccctgtcagtgcctcctggtggccatttttcctctttttgttatatgtgtcctgagggtcccttaagctatttgtaggatagggtagagaataggacgttttttgtcttttttctctcttacgcatttaggacttttttttttttttttttggtctttcacttttgaaagaattctgacactgaagtaggtcttccgaatcctgcttgaatggtgcttaacagaaacctgggttatagctaagaatctctgaatgtccaggggtcgagttacctaaagcccaatagacctcgttaagtcaaagttgctgcaggagaggaggtctcttgatggcgatgccagggtcgcgggccatcccctatgccactcaataagcaaagttaaaaccgagaaactcagcccacaccgcaggctgcaggctgcaaggcctcgcctcagtggctactgattcagcgtgcacagaaggtcccattacacttttaggtagttacaaatattattttcctcctttgactaagagatcaaacaagcttcggttttgcaatgacctcgaatttctccacagtaaagtggccccagcagaatactgcagacccatgcgtagcccttgtagcggcgccgaccggctcagggaatcaaatcctcttggccggctggtccagaggccgatagacccggggctgggctcgaaccggtcgccccccaggccacctgcctgagcgtcctccgactccatagagagtttgggttctgagtctggctgcgcgctgtgtttcaccgcatgaacccccgaatctcaactattctttttgttatcagcactccttgcctctcccctccgctattttttggctgaagacgaaactggagtttgcgccttgaaattgactatatgtgagtttcacggcctgggacaccgcaaggactcggcgacggcgagccccacggtcgctcctccgctgtggctgagccctgcttggactcattccttcggggcccttgtttctccctccggcctttgtctaccacccccgagtcggtcaccctgccacgcccattccggactcccccaggcctctccactccccagaaagcccgtaagctaccctctgttgcggaggatcccacggccaggggtcgcttcccgcgccgggactccccagcgcacgagctgtccccgggacccagctcccggcttcccgcccctcgagggtcgcgctcgcaggggcgcgcaccgatcgagggtcccagactccggaactgccctctccaggccgcggggcgccctcctgcgcgcacgacccccgcctctccagggtgggacggcgtccccccttgccgtcgctccagggagcccggccgccgcgcccttcctccgcgggctcccacccccatttccggggtctcctccctctcgcccgcaccttcccgcgctccctccccgccctccccgccgcccgcccgcgctcacctggttgtttttgcagagatcagcccacatgctggtgccgtcccctccgcgcatcaggacctggtaggtgaagaagtagatgcccgggatgg

SEQ ID NO: 824 - DNA, 3656 bp, Homo sapiens
gtctctcagtacacacgccacagtagaagtcagtatctttacgacaagcacaataggttaatgagtaaaaagttgaaagcatcctgaaaagcgaaaatgaaagacaaatgacatctaatgagttaacatttttcacagggtgcgtctcctggtggaagagggctgtgaagatcgaattctggtagcacatgacatacatacgaaaacccggctgatgaaatatggaggtcgcggctattctcatatactcaccaatgttgttcctaaaatgttgctgagaggcataactgagaatgtgcttgataagattctaatagagaaccctaagcaatggctaactttcaaataggatgggtgcttatgaattcacaccttgagtataaaacttgcagagaacattcagcgatttccagtccactgtgagatattaatcagttacctatgactaatgacagatcatttccttctgatgagaactaggaggggttgccttctctgagaccagctattacaactgtgcctctagggagttactcagcctaattgagccctattattttaacttaacaaaataaatacagaagtacctatttctaaacaatgatttaaagtctatatcccctaagcggagttgttgtttttctccctaatctatcagctgcactacttgagaaaatttaaagtgtttctagttaaattatttccttcttgagcgatctaatgtttcttgtaatattgatgatcctactaattatcctgctgttctttaattaatgcttaatgaataatatggcactgtaaaatagcttctgcaacaagggaagttaaattttgagacttttttccccaaaggatactgactgtaatacaattaccaattcacaatgataaaaatattttgaaaggttaattttatactgtccacctatctatatattcttctactgaaatgattttgatatctttggctttccggtatctatttttgccatacattttgctgttttgcaaagtttgtataagaacacataacactactgaattataaaaattcaatcataaaagtcaaaatatattacataatatagtttaatgaatcattacatttataataacaaaggccacaatttaattaattggtaagatataatgcaaaaaaaaaaagagaaatgtttgccttatgtatattccctttatttcctttaccttttgtttttccttggacctaaacagagaaaataatgcttatgtatctgaagaaaaggtcagatctattggaaatgacagcccgatacttgagcctcctctttaaaaggtatccagccctgatattttgtgtaaataaaatgtttttaaaacctgttagttaaaacacttaggtgatgggcactgctgcttataaattcatcttttggttgaatcctcactatgctatttggtacctaaaaatattctccaaacccttgctgccagttcctctttgataaatatatagttaattcgaaataaaatccattgcaattcatttatgagttatcttacatatcacaaagaccaattagaattagtcattattcttgatgaagagtctgtttttaatcataaaaatcatgacagttactcagacccaggcatttcaacagagctaacaccaccttcagataggcacaccatgcataactcttgggaagttgagctttgctaaataaaagatatttctgctgatcaaagatgatcaagctttctgtgtattggaacagaaagtaacaaagaggaatgagccaggagaacaaactaattcctttaaataaataaaaaaaaaaaatgcaaatgtccttcaccagtaaagcaagcaaatttttaaaatctctgtttttgaaatctactcgtcaaagagttttcagaggcaatgaaaggggaacagatttttcattgtaatagtggaagttgtgtgatagttaggagatatcaacatgcatttttaatcttttccttagatgaaagagatggcttttggcagtgtgttctaaccagaaagaaaggatttgtattactctccaaatctactgtactgtcagcttcactccacctgagaaaaaagaaaaaaaaattgatagctcaaatgcatgtaattcataaacactgcaaaggagagccacttggtgtctgcagtcctcatattaacagtctgtcacagaatgcagttaaagtattgattggcatatggtaatagagcaaccatagccttaacttacagacctgtgaaataaagggcattttgacctaatacaattaattttctggataactcttaaaagagaagtcattttaactgtttttgctactccatatattgtcattcaaaatatattttaacccaaaataagttaaataatttgtgcatgtttgtgtgtgtatatatgcatacacttttttatattaaaattttgaggctatacagccactgtgccctgtggaataaagccatatatataaatgttttatatgtatatgttttatacataaataaaacatttcatctaatatatatatgtgtgtgtgagtatatgtgtgcatgtttagcagatatttgtataaaatataaacactctgttgtcatataggctatatgcgaaattgttaattttaaaataacctcaggccacagacttgtagtaatcatttgaaggcctcacctagtgtccccttggtgacgtatgcagcagctcaaattaaacctttgtgcattgggttatgaataatcttttcttccaaagatggcaaaagcctcggtttgatttgatactaaagaataaatttctctgactttcccagtgaatctaaatgtattcagttgacaaaatggacacataagggctttttctaaataccgtacataattacacattttcacacttagagggtaatcctatgatacactgtcaatctctatttttaaagactatcaccagaaaagagagaaaagaaaattcatataagaaaaagaaaatgtgaaaaagatcataggcttgggaattccctcaaatccagaaaattccaggttaaggcttgaagttgaatcattcccaggtctagctctaaggttaacaagagtacaaggcaaacaatttctttggggacaagcagcattatttcaattagaccttctcctgcagggcaaaaatcattcttccccacactatgaatggactccaagtatcataataagcaggtaaactcacaagaaccaaagctgacatatggataaaagcagcaagatcacagtacaccaaagtatcatatatatagaagaaataattcaatgtcttagatttgtctataaaaatttgtgatctatataggacttcattcacatggacactaacgataaggagtatttgctttggcggtagtggatcacacatctgcttatcttgctttgatattttttacataatgtttctgagtgatacagatgtgagtcaggtagcatttgatttccccacatatacacaactgaggtgccctgccattggcatcccctgggatccttgattcactgacgttagccatacgaatccagtgttcaaactcagaataataagcttagtttctgcattatcagtcagcataaataataaatccagaaaacgtgc

SEQ ID NO: 825 - DNA, 9551 bp, Homo sapiens
gtttctaggactattcttgataagaaagagctcttggagtttgctcaacttggctgctacttggaatatgatctctttggtactgaactacttcattaccaactcggcccagatattgacatgcctgatgataacaaaagaattagaaggtaaatatggtaaagcctctcatagcattccctttccctagccctttttgattgtcatatctagggaagtattagcaaagattcagaaaacagtaagcaggccgaaccacagacttgcagagaaaaatatatctatgctgtttcagggagaaaaatctctctatattattttaaggagaaaatgagtcatcctaagtaggctaaagcttagcagagccttagaagttcagtgcagatgggcagctgacaggaaacacagataatacccaacccctgccatgaaaatcagagaacaaaagacattttcctctatttacccctaatgaaataagctgttcctctctcaggttgaccacactaaagccataacttcctacaagtaatatttgaaatgctttatcaaaagttttcattaaaaaggtgatttcaagttaaatgctaaaagtataaggtctaaagactaaatattatgtaaaatgaatgcaaccttccaaaactgtataatgtgtgatgctggcagataattgtaggagtcattctttgtaatcaagtagaaaattttaggcgtcaatgatagctacctagtttggtcttggtcacatggtgataagaagattgaatgaaccaagttagaatacctaggaggagaaataaattggagattgacaaggaaggctttcgtttgggaatatctaagtgttgctacccagtgaagccctaagatatggtttgtatgtgatagttgaaccgtgggaatgaatgacatcactcagagaagaagatgaggacagagacctggggacagagacatttaaggaatggagtaggaaccgtttctcaaggaaaggtcgaggagaagttttcaaagtgataacatgagagatatatattcttatggaagtcagtagagaggaagtctcagggcagaagggcttgaatgccggtaataagtgacaaatatcaaggcaaataaagactgaaaagcatccattggatttcacaattaggaggctcacattttataaacagagtgcaatctcagtggaaaaggcttgagaaatgggtgggccgtgaggaagaggagagaggatgttgaggtgactctttcaagaagcgtggcagtggagggaagcaaggagatgggtctggagttacaagtcaataaaggatcaagggaagcttctagtaagagttgagcaatgtttatgtgacttaagagcaaaagcagagacagagccagagagaatgagtccagggaagtggtgcccattccacagggttactatagaattgacatgaaataatgttttccaagtttttgtctgagtgtctggtgcagaatatggaagtgttcaatagatgttgactttaaaaactctggatagataagaaatatagagcaaggttcctaaggcaacaaatagatggaatctggggaacaaatagaaagtcggttgaaaggatgctttctccatggaaatgagagggcatgacacagcgatggggtgaatgcaaacagaagtcttagtgagggaaacaggagactgaggacacatggccacatgtcctctagtgtctctgtgaggtggacatggttatctcctgagaaaaaaagagtggatttagggcagcactgtgtagagcaggagaaaggctaggaatggctgtcaggtcaatgagagagatcttgacatggatgtgttatgtgcgagacctagttgagtctagaaatcatgattgcatgcctgtgtattggcaccaatgcacacgatttggtgattattttccaaagcaaaactgttttgcgttttggtagtggaaccagagaagttgtgtgcgtacaagcagaaaatgggaacagttcaagagattgagggttgggattctatctgaaagagatggataacaatggaggagttgagatgagggtcatgggatccaagttggagggaagaaagcatagagaggaatggtcagatagacaggaaaagcatagcagggcaaataagtggactgcaggctttaatgaagtgggtggagcatatatatatatatatatatgttcaaatatatatactgtatgtgtatgtgtatatatatatgtgtgtgtgtatatatatacacagtagaagaagtgagtggaaaaagtagaaaaatgtaacatgatcggagtgggaaactgaagatggagatttcagagggggagcagtagttccctatgataacaagaactagaatataattatgagaacagaaaagtggttgccgtggaagtagcaaagctggaattgagaagtgatgtccaggaaccatgagattcaagtattgctagttgaataaggcacactgggttgaggggaagatcttgagccagtggtcatagttgggacatcctgaggatctttccctgggaagtcacatttacgtctgtatgccttctgctgtctccaagtactggcattctgccttgatcacctcattaatagtactatgcttcaagtttagtatcattagggaaagctagttaatcagtgttgcattagttaagtaagatggcaactctcaactctacatgagcaaatgacttcacctgtcttgaccaatgaagttctgtcttttaatactcagatcagttatttgacaagtagatgtattgtttctttgtttatttttgttttattattttaatttacttgcccaggaacccgattcaatacaggtgaacctgttcccctaaagccctagtagttagtttatactcagaggagactattccttgcctaagggcatctggaatttaaaatagtgcagtgcattcagtcattctcatctttcacaatctcaaaaacatgatttcctgatcaatgccctcaacatatgttttatttcttttttctttttttctttttcttttttttttttttttgagatggagacttgctctgtcgcccaggcaggagcgcagtggcgcaatctcacctcactgcaagctctgcctcccaggttcacgccattctcctacctcagcctcccgagtagctgggactacaggcacccgccaccacgcccggctaattttttgtatttttagtagagacggggtttcaccgtgttagccaggatggtcttgatctcctgacctcgtgatccgcccgcctcggcctcctaaagtgctgggattacatgtgtgagccaccgcgcccggcctcaacacatgttttctaaatcatcttggaaatgggaactttgcactctggatcggcttccttttccgaagcccctttgtggtagtgaggtgcatcttttgcacacctgtgtctcgcatgaggctcccagaccttctagaacaagagaaagaagatccgtaaaggggcatctgtgaaggagatagaagggtcagatgaccgatggctcccccagcattccttcttagctccttttagccatttgtttaccctttactgtgctaaatatagctattctggatgtatggaaataataaaaattattataatataaatctgtgtatatatatataaaatacctgtgtgctattccatacgtacgtgtatgtgtgtgtgcttaatcttccttaaattaaaccatgcattctcgcttgacccaaggacagcccatgttaagcactgaatgcccttttgggttgcgtgtgctccagtacccactgtcttgcacacttgattttcatcatgcatgaaaggaccacagggtccttttctgagccatcgtagtcttaaaccttgaagtgcatgaacacagaagcacgcttctgcctacctctggtgttcagcaccagaaattctgtgtctaacacctgttttcaatcttctgctccatttctcaaatcttattatatctctgccttttcacactttgtagtctctctctaatatttgtttgcaaacactaactcatttgtatttctataattaccgtgattttttgtcttctcgtctgtagtggctcccccttttctggcagcatctctgtaactcctgttcttccatataatggcacaacaggagagatgatcttttagtgtaagcaggacggggcaggttttcttcatagtcaggatatgattgtgtgtccagagccataacgttatctttctcataagtagtctccagattcttgacttaatgggttctaaggattcccggttttaagtatgagtatcttgtcctctatactctttcattctacttcatgatttgataacattgtgtttcaaggtctgacaaaggacatcttaaaggaatttgtttatccacatgatctgcctttatagtgtgagaaattatatttatcagataagaaacataggcaaaaattttggaaaatgcccagaaaatatcagggagaaagtgtttcctaaaacctcctataccgtgatacttctttgcagttgtggatcaaggtttgtcaccctaagcttcagtattgtgtgtgcattctgtcaaatctttgtctttttatgtgataatataacttatcttagataattcccctaaactgagtgtgttccaaaagtaactgcagatcagaacttcaggatagtatacaaatttcaatgaggcaaaaaatcatagtggcacaaaagtcattacatgcacttataggacaggcatggttcttctctgctagtgcttgcattcctttgacctgcagatacaaagtctattcttccattataatttattttaaaatatgtgttctcagagggcagggctttgtgcttgagttttttttgtgtgtgtagtaccccacgttttgctcactgtagtagttattaaatatgactcatgtactaggacaccaagaaatgcttttgaaacaaaaaagatacctttcaaataatcagcctctggaggaaggcactgtccgtccgtctagatccactttagaatctagacgccaaaaaaactattcagagaatcccatagaagagccattgtctgtgagtggcatcttctaccatcaaagacccatggaagtcacgacagacactgcccagagtccagacacgtacagatggtggctgtcaggaggtgactcacactacagattccagcatttaacaaagcaaagaggatttcatttttagagaatagtcaggaagctgttctttagtccactgactataaatttaaaggaacagcttattattttagcaatcttgctgacatggaaagaagacagaatatatttgtattggtcagtttaatccaatgctcagaggctacaactaaatcaaaattgccatagacttcaaaggggcaaatggttaaaatgctgaccaaccttttttcagtggctttgtagcttatcaaatgcccctcacttgcagaccaactgattttgctctcagaatattttacttgtagtgagattccttttgtttccctattttaatcgcaaacagtccttgatattttttggccagataaaaggagagagcaagaatgagatctgaaaaatgggcccacagggagaggcatttgagagaggattgctgaatacaaatccagaacaaagttatttagtgaaatgccaaaatggtcattcatccaaactggcacatcctattagaagctatctttaatgcggtattgccaggcatggtcataaatgtcacaggttagaaatttctgtatgcatggaataaggatatgttcctgctaggatgcagcaatatttttatcgtcaccacacaatatttattaaaggtctctcagtacacacgccacagtagaagtcagtatctttacgacaagcacaataggttaatgagtaaaaagttgaaagcatcctgaaaagcgaaaatgaaagacaaatgacatctaatgagttaacatttttcacagggtgcgtctcctggtggaagagggctgtgaagatcgaattctggtagcacatgacatacatacgaaaacccggctgatgaaatatggaggtcacggctattctcatatactcaccaatgttgttcctaaaatgttgctgagaggcataactgagaatgtgcttgataagattctaatagagaaccctaagcaatggctaactttcaaataggatggttgcttatgaattcacaccttgagtataaaacttgcagagaacattcagcgatttccagtccactgtgagatattaatcagttacctaggactaatgacagatcatttccttctgatgagaactaggagggtttgccttctctgagaccagctattacaactgtgcctctagggagttactcagcctaattgagccctattattttaacttaacaaaataaatacagaagtacctatttctaaacaatgatttaaagtctatatcccctaagcggagttgttgtttttctccctaatctatcagctgcactacttgagaaaatttaaagtgtttctagttaaattatttccttcttgagcgatctaatgtttcttgtaatattgatgatcctactaattatcctgctgttctttaattaatgcttaatgaataatatggcactgtaaaatagcttctgcaacaagggaagttaaattttgagacttttttccccaaaggatactgactgtaatacaattaccaattcacaatgataaaaatattttgaaaggttaattttatactgtccacctatctatatattcttctactgaaatgattttgatatctttggctttccggtatctatttttgccatacattttgctgttttgcaaagtttgtataagaacacataacactactgaattataaaaattcaatcataaaagtcaaaatatattacataatatagtttaatgaatcattacatttataataacaaaggccacaatttaattaattggtaagatataatgcaaaaaaaaaaagagaaatgtttgccttatgtatattccctttatttcctttaccttttgtttttccttggacctaaacagagaaaataatgcttatgtatctgaagaaaaggtcagatctattggaaatgacagcccgatacttgagcctcctctttaaaaggtatccagccctgatattttgtgtaaataaaatgtttttaaaacctgttagttaaaacacttaggtgatgggcactgctgcttataaattcatcttttggttgaatcctcactatgctatttggtacctaaaaatattctccaaacccttgctgccagttcctctttgataaatatatagttaattcgaaataaaatccattgcaattcatttatgagttatcttacatatcacaaagaccaattagaattagtcattattcttgatgaagagtctgtttttaatcataaaaatcatgacagttactcagacccaggcatttcaacagagctaacaccaccttcagataggcacaccatgcataactcttgggaagttgagctttgctaaataaaagatatttctgctgatcaaagatgatcaagctttctgtgtattggaacagaaagtaacaaagaggaatgagccaggagaacaaactaattcctttaaataaataaaaaaaaaaaatgcaaatgtccttcaccagtaaagcaagcaaatttttaaaatctctgtttttgaaatctactcgtcaaagagttttcagaggcaatgaaaggggaacagatttttcattgtaatagtggaagttgtgtgatagttaggagatatcaacatgcatttttaatcttttccttagatgaaagagatggcttttggcagtgtgttctaaccagaaagaaaggatttgtattactctccaaatctactgtactgtcagcttcactccacctgagaaaaaagaaaaaaaaattgatagctcaaatgcatgtaattcataaacactgcaaaggagagccacttggtgtctgcagtcctcatattaacagtctgtcacagaatgcagttaaagtattgattggcatatggtaatagagcaaccatagccttaacttacagacctgtgaaataaagggcattttgacctaatacaattaattttctggataactcttaaagagaagtcattttaactgtttttgctactccatatattgtcattcaaaatatattttaacccaaaataagttaaataatttgtgcatgtttgtgtgtgtatatatgcatacacttttttatattaaaattttgaggctatacagccactgtgccctgtggaataaagccatatatataaatgttttatatgtatatgttttatacataaataaaacatttcatctaatatatatatgtgtgtgtgagtatatgtgtgcatgtttagcagatatttgtataaaatataaacactctgttgtcatataggctatatgcgaaattgttaattttaaaataacctcaggccacagacttgtagtaatcatttgaaggcctcacctagtgtccccttggtgacgtatgcagcagctcaaattaaacctttgtgcattgggttatgaataatcttttcttccaaagatggcaaaagcctcggtttgatttgatactaaagaataaatttctctgactttcccagtgaatctaaatgtattcagttgacaaaatggacacataagggctttttctaaataccgtacataattacacattttcacacttagagggtaatcctatgatacactgtcaatctctatttttaaagactatcaccagaaaagagagaaaagaaaattcatataagaaaaagaaaatgtgaaaaagatcataggcttgggaattccctcaaatccagaaaattccaggttaaggcttgaagttgaatcattcccaggtctagctctaaggttaacaagagtacaaggcaaacaatttctttggggacaagcagcattatttcaattagaccttctcctgcagggcaaaaatcattcttccccacactatgaatggactccaagtatcataataagcaggtaaactcacaagaaccaaagctgacatatggataaaagcagcaagatcacagtacaccaaagtatcatatatatagaagaaataattcaatgtcttagatttgtctataaaaatttgtgatctatataggacttcattcacatggacactaacgataaggagtatttgctttggcggtagtggatcacacatctgcttatcttgctttgatattttttacataatgtttctgagtgatacagatgtgagtcaggtagcatttgatttccccacatatacacaactgaggtgccctgccattggcatcccctgggatccttgattcactgacgttagccatacgaatccagtgttcaaactcagaataataagcttagtttctgcattatcagtcagcataaataataaatccagaaaacgtgc

SEQ ID NO: 826 - DNA, 363 bp, Homo sapiens
aaggatattgctattatgactcgtgtttttttctcatctttggatttttaatggggaaaaaaattaaaaacaaaatattcatgagctatattagtaatacattagttatcaacccataatatactcctcagctattactaataaccagacatattttattcagtgctttgggtatttaggacatgtgctatgggtactgggctctaacatgggtttctacatgaaggtgttggagaaacacgacatactaaaattactcgatttagacacactaatccttttaaaaatataatgccatttttattctccagggggtgaccacacaaccgagtgaacgtcaccatttttatacagaaggcgtaa

SEQ ID NO: 827 - DNA, 1355 bp, Homo sapiens
catgtaattatgcttggaagcactgactccaatatatatgccaatttagtaaagtggtccgttttgaccattaaataatgacgcagtttgacttcataatattttctaaagattaatcatgagtttgtaggagttgaatgctttgattcattaatttcatctagccattaattcccagggaaacaaatctacaagaaggatattgctattatgacttgtgtttttttctcatctttggatttttaatggtgaaaaaaattaaaaacaaaatattcatgagctatattagtaatacattagttatcaacccataatatactcctcagctattactaataaccagacatattttattcagtgctttgggtatttaggacatgttctatggttactgggctttaacatggttttctacatgaaggtattggagaaacaggacatactaaaattacttgatttagacacaataatccttttaaaaatataatgccatttttattctccagggtgtaaccacaaaaccgagtgaacgtcaccatttttattcagtaggcgtaaccacaaattcctgcgaatgcattagagtgattccacagactgaaaggttaccctcacagtttctaccacctttgttggatcaagccagtgtggttgctttttaatgaatgtaattctgtaagattttaacctatactgtaccgtaagactgtcccaattaaataattgccatactccagtgtacctggcatgattttggtatggctgctcacctgatcctactctaaagatataacaggacttgaaatttcaagctctagtattcagctcagtgacttcaacaattctttcaagccatcaaactattgaggaaggcaatgtgttcaccctggaggctgtttccagattcctaaatgtacagtgatttcagcattctgtctgggaataagatccatccttccttcagcgcaatcaaccgatttctacctgaatttactctaatatcttttcttattacaagataactatttagattctgctttatgtttagtccgtatttctttaaccctaaaaagattatgaatttgacatgtcattgatctctctaataagcgaataccaacccacaaaccactcatccttttaaaaatatttcatgggcatcggtgccataactaataaatttttaagagtaccaactggtctttaattattttatgcttttaatcctgaaacagtattagttttcattcgagtggcttatttattatagtggcattagagtgattgtattcaaatagcaatttttcttcatgttttctgctaaaaggattatcaacattaaagagatttcctct

SEQ ID NO: 828 - DNA, 148 bp, Homo sapiens
agtagagatggggtttcgccatgttggccaagctggtcttgaactcctgacctcaggtgatccacccacctcagcctcccaaagtgctgggattacaggtgtgagccaccacacccagccatttttgtatttttagtagagacgtggt

SEQ ID NO: 829 - DNA, 658 bp, Homo sapiens
gtctgaacggtgacggtggcccctgcagaagcatgtggctaaatctccaccagggggcgatagagctcctccaaatcaagctgctgcccctggagaaaaattggcggaagtcacagagcagtccccaccaaaagtgtttaccaagtggagtctttcctgctggcgtttcctcagggtcaggaagcaactttcccaggacaggggcaccctgaggtccgggtccactgagctatgggggcggcgtgggcctgggctgggttcttgccatcctgggcagcttcccggcgtgggtgactgagcccgggtcctggagtccgcggtcccagcgtctccacttctcagctgattcctagaagctgagtcccgtcccttctccgagcgtggtttcctctcccgccttgcctgcgtcgcaagcagttgtgggagcagaagtgtgtctgtgcatctgtgtctctgtgcaggtattttagaattgttaggatcattatcaccagctttacttttcccaaccatttttttcctcctttttttctcttccttcttctgccacagcaagacccccccgccccaagcacagtagctttctcagcgtcgaatccctccgtgggaccatgttgcaatgaaatttcaacatgcaaatgaaatttctcgaaatttc

SEQ ID NO: 830 - DNA, 348 bp, Homo sapiens
ccaatcaggactctgaggcttagagaggttctgtgggctggccaaaggtttaaagagtaccagacctaggccgggcatggtggctgacgcttgtaatcccagcactttgggaggccgaagtgggcagatcaccggaggtcgggagttcgagaccagcctgaccaacatggagaaaccccatctctactaaaaatacaattagctgggtgcggtggcacgcgcctgtaatcccagctactcaggaggctgaggcaggagaatcgcttgaaccgaggaggtggaggttgaggtgagccaagatcacgccattgcactccagcctgggcaacaagagtgaaactccgtctc

SEQ ID NO: 831 - DNA, 341 bp, Homo sapiens
catttttaaaaatactttttatttatttatttttttttttgagatggagtcttgctctgtcgcccaggctggagtgcagtggcgcgatctcggctcactgcaagctccgcctcccgggttcacgccattctcctgcctcagcctcccaagtagctgggattacaggcgcccccccaccaggcccggctaattttttgtacttttagtagagacggggtttcaccgtgttagccaggatgggctcaatctcctgacctcgtgatctgcccgcctcggcctcccaaagtgctgggattacaggcgtgagccaccgcgcccggcaaaaatacattatgataagt

SEQ ID NO: 832 - DNA, 973 bp, Homo sapiens
gaataaatgagtttgaaaagagctttgatcgcaaaactcctacatttttagagatctggaatgactcagttgatggtgattccttttcctctttatccagtcctgaaacaggcaaatattctgaacattcagggacacatcaggaaagcaatctaattgctagctaccaggagaaaaatgaacatgacatttctgcaactgtgcagccagaggatgccagggtcatttcaacaagctcaggttctgatgatgacagtgtcggtggtgaagagtcaatagaggaagagatccaggtggccaactgcaacgttgctgaggatgaatccagagcttgggattcattgaatgaatctaataagttcttggtcacagctgatcctaagtctgaaaatatttatgactacctagacagctcagagccagcagagaatgagaataagtcaaacccattctgtgacaatcaacaaagcagccctgatccctggactttctcaccattaacagagactgaaatgcagattacagcagtggagaaggagaagagatcttctccagaaacagggacaacaggagatgttgcatggcaaatatctcccaaagcttcgttcccaaagaacgaagataattctcaactggaaatgctgggcttctcagctgatagcactgagtggtggaaggcctcaccccaggaagggagactaattgaaagtccatttgaaagggagctgtctgactccagtggtgtgttggagataaattcttcagtacaccaaaatgccagtccctggggagtaccagttcagggtgatattgagcccgtggaaacacactatactaatccttttagtgacaaccatcagtcaccctttctggaaggtaatgggaagaactcccatgagcaactctggaacattcaaccaaggcagccagacccagatgctgacaagttcagccagcttgtaaaattagacca

SEQ ID NO: 833 - DNA, 972 bp, Homo sapiens
gaataaatgagtttgaaaagagctttgatcgcaaaactcctacatttttagagatctggaatgactcagttgatggtgattccttttcctctttatccagtcctgaaacaggcaaatattctgaacattcagggacacatcaggaaagcaatctaattgctagctaccaggagaaaaatgaacatgacatttctgcaactgtgcaatcagaggatgccagggtcatttcaacaagctcaggttctgatgatgacagtgtcggtggtgaagagtcaatagaggaagagatccaggtggccaactgccacgttgctgaggatgaatccagagcttgggattcattgaatgaatctaataagttcttggtcacagctgatcctaagtctgaaaatatttatgactacctagacagctcagagccagcagagaatgagaataagtcaaacccattctgtgacaatcaacaagcagccctgatccctggactttctcaccattaacggagactgaaatgcagattacagcagtggagaaggagaagagatcttctccagaaacagggacaacaggagatgttgcatggcaaatatctcccaaagcttcgttcccaaagaacgaagataattctcaactggaaatgctgggcttctcagctgatagcactgagtggtggaaggcctcaccccaggaagggagactaattgaaagtccatttgaaagggagctgtctgactccagtggtgtgttggagataaattcttcagtacaccaaaatgccagtccctggggagtaccagttcagggtgatattgagcccgtggaaacacactatactaatccttttagtgacaaccatcagtcaccctttctggaaggtaatgggaagaactcccatgagcaactctggaacattcaaccaaggcagccagacccagatgctgacaagttcagccagcttgtaaaattagacca

SEQ ID NO: 834 - DNA, 973 bp, Homo sapiens
gaataaatgagtttgaaaagagctttgatcgcaaaactcctacatttttagagatctggaatgactcagttgatggtgattccttttcctctttatccagtcctgaaacaggcaaatattctgaacattcagggacacatcaggaaagcaatctaattgctagctaccaggagaaaaatgaacatgacatttctgcaactgtgcagccagaggatgccagggtcatttcaacaagctcaggttctgatgatgacagtgtcggtggtgaagagtcaatagaggaagagatccaggtggccaactgccacgttgctgaggatgaatccagagcttgggattcattgaatgaatctaataagttcttggtcacagctgatcctaagtctgaaaatatttatgactacctagacagctcagagccagcagagaatgagaataagtcaaacccattctgtgacaatcaacaaagcagccctgatccctggactttctcaccattaacggagactgaaatgcagattacagcagtggagaaggagaagagatcttctccagaaacagggacaacaggagatgttgcatggcaaatatctcccaaagcttcgttcccaaagaacgaagataattctcaactggaaatgctgggcttctcagctgatagcactgagtggtggaaggcctcaccccaggaagggagactaattgaaagtccatttgaaagggagctgtctgactccagtggtgtgttggagataaattcttcagtacaccaaaatgccagtccctggggagtaccagttcagggtgatattgagcccgtggaaacacactatactaatccttttagtgacaaccatcagtcaccctttctggaaggtaatgggaagaactcccatgagcaactctggaacattcaaccaaggcagccagacccagatgctgacaagttcagccagcttgtaaaattagacca

SEQ ID NO: 835 - DNA, 657 bp, Homo sapiens
cagctctcttgctgtcactttcagtcctcaaaccgaggaaccagaggaagttttagagtatgaggaggggtcttacaatctagactcccgtgatgtgcaaacagggatgtccgcagataacctgcagccaaaagatacccatgaaaaacacctcatgagtcaaagaaattcaggtgaaactactgagacttcagatgggatgaatttcacaaaatatgtatctgtacctgaaaaggatcttgagaaaactgaagaatgtaactttctagagccagagaacgtgggtggagggccacctcacagagttccccgaagtcttgactttggggacgtccctatagacagtgatgtgcatgtcagcagcacacgttctgagataaccaaaaatcttgacgttaaggggtctgaaaatagccttccaggagccggttcgtctggaaattttgacagagatactatttctagtgagtatactcattcaagtgcatcaagtcctgagttaaatgactcttcagttgcactgtcctcctggggccagcaacccagttctgggtatcaagaagaaaaccaaggcaactggagtgaacagaatcaccaagaatctgaactaattaccactgatggccaagtagaaatagttaccaaagtgaaggattt

SEQ ID NO: 836 - DNA, 1708 bp, Homo sapiens
atcgatgaagatttactgagagagcctgaacacttcctgtatggtggtgaccctcctttggaggaagattctctgaagcagtcgctggcaccgtacacacctccctttgatttgtcttatctcacagaacctgcccagagtgctgaaacaatagaggaagctgggtctccagaggatgaatctctgggatgcagagcagcagagatagtgctttctgcacttcctgatcgaagaagtgagggaaaccaggctgagaccaaaaacagactgcctggatcccagctggctgtgctgcatattcgtgaagaccctgagtccgtttatttgccggtaggagcaggctccaacattttgtctccatcaaacgttgactgggaagtagaaacagataattctgatttaccagcaggtggagacataggaccaccaaatggtaagaaacattccattcttccacttccaagaaactgctgcgttgattaaactagtgcatatttgtaagacacactcttcctaccaatgagggtagagagaaaactaactacatttgcaaggcatgcctcactaagtcctgtattataacagcagtaaaatctagtgcatatgtaatacctattcctgatagtgcacgagaaaatcgaatgactctacaaaataaaaatattttctagctgggcgcggtggctcacgcctgtaatctcagcactttgggaggccaaggaggggggatcacctgatgtcaggtgttcgagaccagcctgggcagcatggtgaaaccccatgtctactaaaaatacaaaaattagctgggcgtgggggcaggtgcctgtagtcccagctactcgggaggctgaggcagaagaatagcttgaaaccaggaggtggaggttgcagtgagccgagatcacaccatttcactctatcctgggtgacagagcgggactctgtctcaaatgaatgaataaataaataaatatataaaaaatattaaattacctcttttagatgatcatttgcaaggatcacaaatcacacaatgtgttaattaaaccttgttctcctcttctcactttcaacttccacttctaggtgccagcaaggaaataccagaattggaagaagaaaaaacaattcctaccaaagagcctgagcagataaaatcagaatacaaggaagaaagatgcacagagaagaatgaagatcgtcatgcactacacatggattacatacttgtaaaccgtgaagaaaattcacactcaaagccagagacctgtgaagaaagagaaagcatagctgaattagaattgtatgtaggttccaaagaaacagggctgcagggaactcagttagcaagcttcccagacacatgtcagccagcctccttaaatgaaagaaaaggtctctctgcagagaaaatgtcttctaaaggcgatacgagatcatcttttgaaagccctgcacaagaccagagttggatgttcttgggccatagtgaggttggtgatccatcactggatgccagggactcagggcctgggtggtctggcaagactgtggagccgttctctgaactcggcttgggtgagggtccccagctgcagattctggaagaaatgaagcctctagaatctttagcactagaggaagcctctggtccagtcagccaatcacagaagagtaagagccgaggcagggctggcccggatgc

SEQ ID NO: 837 - DNA, 1713 bp, Homo sapiens
atcgatgaagatttactgagagagcctgaacacttcctgtatggtggtgaccctcctttggaggaagattctctgaagcagtcgctggcaccgtacacacctccctttgatttgtcttatctcacagaacctgcccagagtgctgaaacaatagaggaagctgggtctccagaggatgaatctctgggatgcagagcagcagagatagtgctttctgcacttcctgatcgaagaagtgagggaaaccaggctgagaccaaaaacagactgcctggatcccagctggctgtgctgcatattcgtgaagaccctgagtccgtttatttgccggtaggagcaggctccaacattttgtctccatcaaacgttgactgggaagtagaaacagataattctgatttaccagcaggtggagacataggaccaccaaatggtaagaaacattccattcttccacttccaagaaactgctgcgttgattaaactagtgcatatttgtaagacacactcttcctaccaatgagggtagagagaaaactaactacattttcaaggcatgcctcactaagtcctgtattataacagcagtaaaatctagtgcatatgtaatacctattcctgatagtgcacgagaaaatcgaatgactctacaaaataaaaatattttctagctgggcgcggtggctcacgcctgtaatctcagcactttgggaggccaaggaggggggatcacctgatgtcaggtgttcgagaccagcctgggcagcatggtgaaaccccatgtctactaaaaatacaaaaattagctgggcgtgggggcaggtgcctgtagtcccagctactcgggaggctgaggcagaagaatagcttgaaaccaggaggtggaggttgcagtgagccgagatcacaccattgcactctatcctgggtgacagagcgggactctgtctcaaatgaatgaatgaataaataaataaaatatataaaaaatattaaattacctcttttagatgatcatttgcaaggatcacaaatcacacaatgtgttaattaaacctttttctcctcttctcactttcaacttccacttctaggtgccagcaaggaaatatcagaattggaagaagaaaaaacaattcctaccaaagagcctgagcagataaaatcagaatacaaggaagaaagatgtacagagaagaatgaagatcgtcatgcactacacatggattacatacttgtaaaccgtgaagaaaattcacactcaaagccagagacctgtgaagaaagagaaagcatagctgaattagaattgtatgtaggttccaaagaaacagggctgcagggaactcagttagcaagcttcccagacacatgtcagccagcctccttaaatgaaagaaaaggtctctctgcagagaaaatgtcttctaaaagcgatacgagatcatcttttgaaagccctgcacaagaccagagttggatgttcttgggccatagtgaggttggtgatccatcactggatgccagggactcagggcctgggtggtctggcaagactgtggagccgttctctgaactcggcttgggtgagggtccccagctgcagattctggaagaaatgaagcctctagaatctttggcactagaggaagcctctggtccagtcagccaatcacagaagagtaagagccgaggcagggctggcccggatgc

SEQ ID NO: 838 - DNA, 657 bp, Homo sapiens
cagctctcttgctgtcactttcagtcctcaaaccgaggaaccagaggaagttttagagtatgaggaggggtcttacaatctagactcccgtgatgtgcaaacagggatgtccgcagataacctgcagccaaaagatacccatgaaaaacacctcatgagtcaaagaaattcaggtgaaactactgagacttcagatgggatgaatttcacaaaatatgtatctgtacctgaaaaggatcttgagaaaactgaagaatgtaactttctagagccagagaacgtgggtggagggccacctcacagagttccccgaagtcttgattttggggacgtccctatagacagtgatgtgcatgtcagcagcacatgttctgagataaccaaaaatcttgacgttaaggggtctgaaaatagccttccaggagccggttcgtctggaaattttgacagagatactatttctagtgagtatactcattcaagtgcatcaagtcctgagttaaatgactcttcagttgcactgtcctcctggggccagcaacccagttctgggtatcaagaagaaaaccaaggcaactggagtgaacagaatcaccaagaatctgaactaattaccactgatggccaagtagaaatagttaccaaagtgaaggattt

SEQ ID NO: 839 - DNA, 657 bp, Homo sapiens; identical to SEQ ID NO: 838

SEQ ID NO: 840 - DNA, 1713 bp, Homo sapiens; identical to SEQ ID NO: 837

SEQ ID NO: 841 - DNA, 727 bp, Homo sapiens
ggtagtgacttgctctgccatcttattccaagagtggtatggcatgacagctggagatatcattgggaccctgagtggattcttcactattatcattggcatcttccttctacatgcttttaaaaatactgacattacttggagtgagcttacatccactgctaagaaagaagccgtctctctgaatgtcaatgaaaacaattatgttttactagagaacttggagtgttcagccccaggatacaatgatgacgttaccttgtttagtagaactgatgactgaagtctctagaaacactgagttttaaccaatatgagacacacgaagaggaaaatgaatgcttgcttcttggaagaactgctaggaaagttagcatttttgcagttctaactaatttagatgtgaggccaagtaaaaatgccatttttttggccattgaatttgaaaatcaaattgattatcctccagaatctctacaaactttgaaatactctctaaggatcaaagaagtcaaagagctatgtgtgtctcagaataatctccttcttctggtcacagtatctttgtctctgccaggtggctcttcatttctttggtagctatttttagacttacagtcattcaccaatatacagttagcagtgttctgatagacacagtatcagtcatattctccgttgagtcataatttcaaactcaacaagatttcagaaaggtataatcatg

SEQ ID NO: 842 - DNA, 2100 bp, Homo sapiens
ttcatcctgttgtttttgttatgatatataatgctgctgtgaacattattgtacctgttctttggtgccttgtgcatatatttctattgggaacacaccaaatagtgaaattgttgtagatgtaatgccatgtatgagagttcctgttgttttgtatactctccaaacttagaactgtcagtctctttaattttagccattctggcatgttcacaggagtatcacattgtgggtttaatttgcatttccctgattacttattactaataatcttttcatatgcttattttcttttagaacgtgcctatgcaagtctcttgtccatttttcaactgttttctatttcttatgaatttgtaggagttctttgcagcttctggctatgcatccttcattaattttgtgtgttgcaaatatattcttccattttgtgacttgtctttttagtctcaaaacagaatcttttgatgaaaagaatttcttaattttgatgtaacctcatttatcactcttttccttcatggttggcacttgttgtgtcttgtttgacaatgttgcctatcccaaagtcatgaagattttctcttatgttaacttctaaaagttgtatcatttgtcttttatatttatatctacataatgcacctggaattgagttatatgaatgctgtgaatttgggaggggcgtgtttcctttttttcccacatggatatccaatcaactcagccacatttactgggggaagacatctttttttctaatgcgctgtagtgttaggtttttcaaaacttaggtgtctgtatatgtgtgggtctgtttatgagtctgtctattcttttccactggtctgtttcctacacttgtgccaatgccacactgtcttacttatagctctataagtcttggtattgttaaggaaaaatatttgtaacatttgttaaaaatggcagagaagactttattcaaggaggggaacattgtgataggtagagggactgctgcaacgaggtcttgctgtggtgaggagagagattgggctggagtccaacttctacaaggacaagaggggatttatagtcaagcagcagggtggggtcagtggatggaagaggaaacatcagagacaggggtattcttgctagaccaactcaacagaattcttgctgaaggcaggccagggtgataagatatcaagagttaggggtgaggacagataccaagggtggagaattttcactaaaactagtaggattcttgcttaaactggattctataagacagaaaaggaagcccaaggtcagggtctagtggaagagaaggctccggggagcccgacctgagtttgatctaggagagtctttgtcaatatcctgtagaatatgaccttcacctcattttcttttcctcaagtgtatctggactgtatttggccttttgggcttccaggtgacttttagagtaagtttatcaagatctacaaaaatagctactgagattttgatttgaatagtatttcttcctgataatttctgagtaaaattcattttaaggaagtaggaggggcagtggcctgatgaaaagcaaaaatgaagaaaagaataaggaaagacacagttttgccatcaccagccagtgtttagtgatcttaaaatagctgcttttgtttttgagcatcatttgttgggtatggagttgcagaagttgggttgagggacactggcttctagaatcaaatattggcctccatagagtgtttctgtacagtgagttgggaggatgggcaggggccactgaggactgtggcgtgtccccacgttagagtgtatctcacacagagcctgtcctgaaaatatagttatttttaaaaagtgtttccccctccttttcattggccattttctcttttactactctttacctagcaaagggtgggcatgagaaacctggtcagtggaagagaaagccattttgcaacagtggttataggggtgggagagtaaaatttcctggttcctggggaagctaagcccattggtaggaccagacttttgtatgtgtgtttcttcctttagtcatctactaaggttaataaatacctt

SEQ ID NO: 843 - DNA, 2100 bp, Homo sapiens; identical to SEQ ID NO: 842

SEQ ID NO: 844 - DNA, 582 bp, Homo sapiens
caaaccatccatacaatgccttaactgtaatagaaaggaagtacaaaaggggagaaatgtatcatgaactaagaagtatttcatgactacactggaagacataatggtgtggtcatatgttttgcacccacttgtaggatcactgcaaacgtggcagctataaatccagatggctgcagatgtgttatattggccactcaaatgacataatcggtgttgactttagtgatgtgatatttctgaaatggtgaatacgtgttagtaaagttctaaacaaaacaaagtacatcattccctattgaaatccagcatttatgaaaatcatggaggaaacccttgtgttgacaggtaaaatggcgtaggcttttcagcccttccaggggagactggaaagtcctgggggacatagaatatttgtggcttgtgctagaccatcccatgtactgcaggttgtccagcctgtctggccccaccccttaaatgccactaatgactcccaattgtcctgtgactaccagaacagcccccatggatttccagatgctttttcaagcattttgggttttgtttgcatgtaatgag

SEQ ID NO: 845 - DNA, 582 bp, Homo sapiens; identical to SEQ ID NO: 844

SEQ ID NO: 846 - DNA, 471 bp, Homo sapiens
ctggagtgcaatggcgcgatcttggctcactgcaacctctgccacccgggttcgagcaattctcctgcctcagcctcctgagtagctgggactacgggtgtctgccatcacgcccagctaatttttgtgtttttagcacagacagcattttgccatgttggccaggatggtcttgaactcctgacctcaggtgatccacccacctcggcctctcaaagtgctgggattacaagtgtgagccagcggtggcctctcccttctttcatacacaaaaagtagcatactcttgtcaggcgcggtggctcacgcctgggcaacaagagtgaaactctgtctcaggaaaaaaaaaaaaagtagcatactctctatttcacatttttattttccacaaagcaatatatactgaaaaccactccgtatcagttcataggtatcattcttttcctttttttaacttggatagtattccat

SEQ ID NO: 847 - DNA, 439 bp, Homo sapiens
gaatttcaaatgtgaaggaggcagtcttctcattttggatttaacactagggaaacagaaaactatacctgctcaatgtgtcccaatgtcctgcaagaaaaaggaaaaaaaatacccatgagaagtcatttaaaacttcggttttctttcacagatgtttgtgaaaaaccaactacagactggctctcatgggagaaattagggagaaaaggatcactggaacataactcagtgttgaggagctaaaaggcaggcagaggaaaatgggatgcatactatttgctataccagcatttcccataccctccttcagtacccaccatccactggtcaaggacctcaggatttcaaatttactaacttaagcgtcctatgattggacctcaagcttgcctacctgtccagcttgctttctttttattatgaaataatttcaaat

SEQ ID NO: 848 - DNA, 479 bp, Homo sapiens
aatagagtggggttccttcagatatcctataggattctgcctctggttttgtataggccttggctagaaagagtcaatgtttctgagctctcaaaccagttgctctcagaagataggaataccccaaggttcctggcatttttcctatttcatttttgttcagactgatattttgccaagagcacaatgactgaggaatgtagccatcatttgcagggtagtgattggttcccagcctggcttccacacaggacaggaagggaaagcatccctgagctctcctcagtatttccggatgtaatgaaagaggacatctttctacacaaagtcagccccaacttttggcttggtcacaggagttctgatagtactgtttggtgcactcatgggaaattgaaccagtcgtagccacagtctttcagagcctgggctctggggagtggaagtgaaaaataaagatgtggcttgttggattgtga

SEQ ID NO: 849 - DNA, 973 bp, Homo sapiens
gaattctgactgcaataggcaccagtgcccaacacatacagccccaccatcatccccttctcattttataaacctcaaagtggattcactttctgatagttaacccccataaatgtgcacgtacctgtgtcttatctatattttaacctgggagactgttgtcctggcatggagatgaccatgatgctggggttacctcacagtccccaccctttcaaagttgacatatggccatcccattggccagaatccacagacacacctaagcctgtggcactgggacagaatagattttccatttgagaggcacttcctgtgtcagtcttgtttgaaggaggtggtgatggtggatagaggtgaaggaggtagggagtgccctccaagtgcaaaaataacaaatatgattattgaccatcggggaattctcacacattgatttgttttttaagcaattgccagaaacccccttttttagcttttgcttggggtgggggtaggagttaaggtttattcaatcctgtcctgggtagggcgaaagttaatctagccatgtgatttttcagaaaagtaagtggaacatgctgccacttttcaattctgtcagtgcttccacatggaaacaaaatgcaataaaatttttccaaaacctgttctgatttagctctctcttgaggtgttacccttagtgggaggccgactatccacaatctacttgagttttctctggttgggtgtttgtttcattgctctgtctcttgaatgaggatactttattttttttgttttaaaatgcatttatggtccctctcttgaaccagcttgccccaccaggcctctttcctttgctttctgcagcctgaatcaattcctttgtgctgatgggctctcctaagagctttcctgagtcagttaactttacctcgtgtctacggtgctattcatgcgatacgggcgaggctgagatgctaagatt

SEQ ID NO: 850 - DNA, 294 bp, Homo sapiens
tgtggacatccctcacgcctgtaatcccagcactttgggaggccgaggcgggcagatcacgaggtcaagagatcgagatcatcctggctaacacggtgaaaccctgtctctactaaaaatataaaaaaattagctgggcgtggtggcaggcgtctgtagtcccagctacttgggaggctgaggcaggagaatggcgtgaacccgggaagtggagcttgcagtgagccaagatcgcaccactgcactccagcctgggcgacagagtgagactccgtctcaaaaaaaaaaaacaaa

SEQ ID NO: 851 - DNA, 828 bp, Homo sapiens
aataaagatggatcaagaaaatgcatgtatgtatacacacacacagtggaataccaagtcttgcagaagaaggaaatcctgtcatttgtgacaacatggatgagctgagagaacattatgctaagtgaaataagccagacacagaaagaaaaataccagatgatctcacttatatgtggaatctaaaaaggttggactcagaagcagagagtggaatggtggttaccaaaggccagagggtgcaggaagtgagcagatgttggtgaaagggtgcagaggttcagctatgcaacatgaatgaattctggagatccactgtgcagcatggtgactatgatactgctttgtgtatttaaaattttcagagagtagatcttgtgttctttcccctctccaaataaaaggaaattatttgaggtgatggatatgtttaactagcttgactggggcaatgattttgtaatgataagtatctcaaaacatcatgttgtacaacataagtatacaattgacccttgaacaatacaggtttgaactctgtgggtccacttacatgcggttttttttttctgtaaaagttacacccgatgcgtcagccccttcttctacctcttccacctctggcacccttggcacagcaagaccaaccccccacttcctcctcctcctcctcagcctactcagggtaaagacaaggatgaagacctttatgatgatccacttccacttaatatataataaatatattttctcctcatgattttcttaaaactttttctgtattttattgtaagaatacagtatataatacatacaacatcgaaaata

SEQ ID NO: 852 - DNA, 828 bp, Homo sapiens; identical to SEQ ID NO: 851

SEQ ID NO: 853 - DNA, 828 bp, Homo sapiens; identical to SEQ ID NO: 851

SEQ ID NO: 854 - DNA, 828 bp, Homo sapiens; identical to SEQ ID NO: 851

SEQ ID NO: 855 - DNA, 541 bp, Homo sapiens
gactcagctcttcaggaacaattagggagagggcccttgggtctaactgcaaaatcatacttgaactagaaaatcccgttggcataggtatggattgtcatatagaaacatttttcgcagtgtgccccgtggaacacttgttctgtatgttgttaacagatgttttgcaaaaaatgaaaaggacctgagctctaataagtttgggaaatgctgaattgaagtgaaacagcttttcttggtgtgagacctttcagagtctttaaaggagagttgctgaccacacgtgaaatcacaatagaaaatggccagcaggcctccaggtaggcagcaattcctagacatttgcctgtgttccctgggggagctggtggcctgtgaccatccactgggaaattcccttctgtggcgaggttctgttgttttccagaggctcccacggagcatgctgggtgggtggtctgtatgagaccacaccgttgatgagcagtgaggcccaaacaggtatatcaaaaaatgctcagcatcgctgatcatcagggaa

SEQ ID NO: 856 - DNA, 541 bp, Homo sapiens; identical to SEQ ID NO: 855

SEQ ID NO: 857 - DNA, 541 bp, Homo sapiens; identical to SEQ ID NO: 855

SEQ ID NO: 858 - DNA, 541 bp, Homo sapiens; identical to SEQ ID NO: 855

SEQ ID NO: 859 - DNA, 4665 bp, Homo sapiens
agtatctcttctctgcttctgtatttcctaggaacatgcttttgaaagcagccagaaatataaagaaggcaaatacatcattgaactagcacacatgatcaaggacaatggctgggactgattggacagcatctacccaacccagtgtccacgtgaacgccattcaaccgaacattcttcccaagcgtgagagagtgactgacacttggttccatccatttaggggccttgccatccggggcatcctcccaccctgacgccatctttctggtgaccggcctctaaatcgctgtctctctgtctctttgctttgtatctgtttgtgagttgatcctggcttctctctctgttctagttttggctgaaaacaaaacaacaaaaggaacagatccttgaccgcatggcggcagcccaccttggtaagggccccagggcccatgcgagagctgcctgatggcctcttgtcaggagagcagtggcacgggggcgtgaggaagagggaaaggggaaactctaagggtcctggcgcggggaaggggtggaagggtggaggtaggaacaaaattgcgccgctcctggagacctgataacttaggcttgaaataattgacttgtctaaaaggacaaagagaaaaaaaaaatacctcatgactgcattctctctgactagaagcttctgttcctgacaccaaatgtgccaggttagcaaatgagcacaagatgtggccctgattctagttggtggggcaagggcctggttctcctgggctgagtgggggagtgtcctggcagcagcgagtgacctgggcagtggccaggtgggtgcgatgactctgatgcctcactcagtctctgggcaatcatcatctttgcctctagccaccgtagataaggtgtgaagggactgctgtttgcaatgggcttaccatccaaatatcccaaaggctttgaccagcaaccaagtaaaatcagtaattgaggagagcagggcacaaaggggctgcagtttgggagctcctgaagaaatggctcagatattgagtcagagaaataaaaagtaggatcagttagcaattctaactgcccttccttctgacccctcataagaggagtgtggtgagggaggggactgggtaggggtcatcccaggaggaggggtttacattggaaccagttcaggttcggtgcatctttcctcttcggttttacagtggcttccgtgggatcgtcaatttcttgttcttagagtttcgggtgtttttctccagtcttgttactgtagactgtagaaagcacgggccccaggctctgagcttagtaataacctggctggtagattcctcatgcccctaattgtcccacttaggcctgaatgtcttgcatggagagaaatctcctgtcagtgtggtccagcagcagggaggagttctgcccaaattccgatatcaccccttcccccatccaagcatccttcgattagggaagtggagagcacatccctgtaaggcccataagagaaagaggagtttgttacatttaatcaacactgtgaagtctgttctacagcaattcagccattacacagtatatgactgaaactcatttaactgggttaatttcatttcttagactgaatatattattgttaagatacgtgtgcgtgttaggtaattctcagcatctcctccaagtaggccgaccttctcggaaaattcaccctaaaagtctcacaaaagaatgagttcatggggagattctgtaaagtgatgaactgagatgaaagcagccaacagcccaggagcttttcagaatagcgtctgcagcagaaccagtttccattcagagcgcgtccttggtggaaatgcttttttgtgtgtctccacgcgctgatggtggaatgggagccccaagacgtgtgggcttagaaatcaacttttgttccccaaggcttcttgtccagatctttccagtgctttcatagccctgggagatcaagttgttctccccactttactgcaaggtagactgaagttcagaagaaatactgaatttctgctcccagaagaatagtttctctggctcacaggcccaagttctcaatgaaatcgttttttaactttcacattcctaagctggcttcccggcacagaagccatggatttcccctctctcccttccccctcctcaaggaaatagtcttcctttatggattttcattggactctttcctcagcgattgtcctggctgtttattgatagtccttcccataagaaaatggggttaaacatggggtaggtattttgtctttcaaactacaaatggaatgtggtgacataaactagacatggggtgccctcaagtttccaaggggaccaatgtgccactgttcttccttggggatgaggcctttgactgttggatggatcagagcaggctccagtcagaccctggttctgaatgttttttttttcggtgactatccagtgagccttcagtgggtgcaaggcgccatacttgctgtgagagagctgagtagagtgttggtttttccataactacagggggaaaaaaagtcattaggctttccctttgtgtcagtgaaaccaaaagtgcttcttacaacgttcgctctgttcatgggttgtctatctaacattgagcagcattggagaggccacagctgagctatggagatgctaaattaactcatggcctcagtcagttcattctttaatttcctcaccaaattattgacttagagcataaccaaagacctcattcattcaccccaggtgggttggggtaattggagtttgttggtgaagtttgggggcggggtgttgggagtagagacagggtaaggggacgtgagaaaggaaaaggcatgaagttctatacctcagccagcagctgccttcgtttggaactgaagtccagccagcagactctctagctccatctcccctgtgccaccctaggtcatatgaccttggccaccttggagtagacccagacccctcgggacccgggacattagtctcaggctgctgatggattgatttgacatgaaccaaacacagccaaactcgatacccacaagctgtcagctgaacctgactgagtgttcttcctgagttcacgaggataggctagagtgcatttttactggtggatcagtgtgtgcgaaagagatgaccctttataaagagattttcaagtggatatatataaaagaaacagttgcttgtaaaatatacttttgtaaataatatttaattttttaaataatatatttggtgctgttttctcagatcccctgagagcactttttattttccttttaaattctatggtttcctttgcatttcttgaagtatattttaagggaaacagtgatcaccaatacatgttttcagttttttttttttttaaggtctctatcactttaatctggatcaaggctttgaagcaatgcctctctgcattttttccccagtggaacagactctgcagtacattaatcaggttgagaattgaaatattttcttgcatcagtattggctagaaaagaaaataaataaaaccaagttaatttagtagtaacaacttacagtgattcttcctgttggaagaatttccaacaaatcagaatcacgtttttagttgtgcgtgtgcgcgcacacgtgtgtaaaaagcactttcgattgtgcctcctgttttctcgagtggggacactttaactacagtttacacctcgggcgcataaagtttttcttctctttctctctggttgtttctgtttctgagtggaccaacagcagaacccacgaggatttgttttgagtatggagctgttgcgggtttgctcctttttcttgctttgcgtgctcagtttttacagactgtaaaggagatgtgttgtttgtgaagatggagcagagtcaaatctgtgcttctaactgagatgagagtgtattaatcacgtatcgcagggctccagctgttttagaagccacatcatgttaaacattaactggtttggattaaaagaacattaatattataatacacatatcttagtggtaaacagctttttttttttaaggtcagattgcctcaggtttagaaagaggctgagaaatcaaatcttgaacacaatcaacttacatattttaaaggaatctgcctcaaatgagaaaatatgctagttatctagatagaggaaagagatatttacttttttaaaaattaaaatagttatgaaatctggcagaaaaggtaaagcctagaagaaactatgaaagctattctcatgttaccaaattctatctgcgcatatgtttttgtataacatttcggtgacagtgggagtcggttccctttcccaacctgcagagactatcttccaatacagaatctgtctatttatgcttgtgtttacaaactgtatttgttgggtttgggtttttgttttctttggtggcatttttcaggtcactttgcttctataacaaaggtaattgttttcaaataatttgtcttcaccttttcctgtatttgtacatagtgattcagtattagagaaaagtgcattgtttctgtcatatttccaatctgtgttggtgctcatttgagaaaataaaagttttcaaatattaactctt

SEQ ID NO: 860 - DNA, 106 bp, Homo sapiens
atcccagcactttgggaggcctaggcgggtggatcacgaggtcaggagattgagaccatcctggctaacatggtgaaaccccgtctctactgaaaatacaaaaaaa

SEQ ID NO: 861 - DNA, 3297 bp, Homo sapiens
gaaaaggactctctggaacatggcaacattaatctgaccacaagctgactggcaggtgctttaaccacaaggtgggcatcctaacgcgagcgaccgttttgaggcagaagcccgatggggcccgtgtccgagcttagggaggggccggagacgcaaacacaggtctcccaggaagcaggcggcgtcacaggtcgctctgcaggcgcccgctgcagcgggcggagtctggctggagagaggaggcgggcgtccgggaacgcccggaaggggcgaggccagcggcggggcggggcttatggagatcgtgagctgggcgtgaggagaaggccgggttgggagctgcgaggggccgggtttagcggggtgggcgtggccgtcgaggtggggctcggcgggtccgaaggaacctggggcagagctggaagaggaaaggtcttgggggccctgggcctgggtctgcgggagccccatctagcggggttccaaggcggcggcggcatcagtcgaggccctgctccgggagctcatcttgtcccctttcgcccctcacgccccccagctctgactccaggccctgtcccctgagctctgccctcggatgtccgaccgcccagagcctgcatgcgccgtggggcgccccaggaccaggagctggtgggtccggggccccctgggcgggggtcccggggcgcccctcctcccttgggacccgttgtcccggtcctggtctttcccccggatctagtattcagggcggaccagcggagcggaccccgacagctgctgaccctctataaccccacaggaactgcgcttcgcttccgaggtaaagggatcggcgcctcgtgggggctggtggccggacactggggggttgtgttggctggaggagtcagatgggtagggttgcacgtccagctttggtggactgggaaagtcatgtccagcctccggggcagaaggcagaggggacttaaatgacccacatggcagggcttgtctgtgtgtgtctctatcccccagtcctgtgcacagcacctgccaaatacacggtgtttgacgcagagggatatgtgaagccccagtcttgcattgacatgtgagtgagctgggagggtggggaggcttgtggaagccaggggtcgctgccacctgttgtctgaggtctgagaccttgccccctttaacctatttgccctatcctctgcctgtgcccctaagggagagacttctggggggaggcccagatttccttggattactgcctcattcaccccaatgggcttctctcctaccttgggaccagtgtgattcgccatgtggcacccattcccagccactatgatgtccaggaccgcttccgcattgagctgtctgaggaaggagctgagggccgagtggtgggacgcaaggacattacctccattctgagagccccagcgtacccccttgagcttcagggacagccagatccagcgcctcgcccagggcctcctgctgggacaccaccacccacggccagacacttccaggagcgtgagttgggagactgggatcttgagttctgtagggagggaggaactagcatttccctagagatgagataaattggatttgaagaagtctcctggttcagtcttttgtcttttggtggaaacattcctccgagttgagattttatatcaggtgagggggaaaagacttacagcttccctggtttctgacttctacttagaggaaaaagttcttccttgactgtaaccgcagtacttcctatcatgtggtagctcagttcagttcaataagaaacctgtattgagcaattaaccctgtaccaagttgtgtgctgggtatgagatcaagagaggtccctgcctgtcggataggtccacagaagagagaaaatgaatgctgagggactggaggagagagttcttgtggtggtggggacagaggctgtaggaaggagaggacacttgcagtgtacccctggagggcagtaaaaagtagatacagggtgtgatggctcacgcctataatcccagtgctttgggaggctgaggtgggctgataacctgaggccaggagttcaataccagcctgaccaacatgatggaaccccgtctctactaaaaacacacaaaaattagctgggagtggtggctcgcacctgtaatcccagctagtcgggaggctaaggcaggagaatcacttgaacctaggaggcagaggctgcagtgagtcaggattgtgtggctgcactccagcctgggtgcaacagagtgagactccgtctcaaaaaaaaaaaaaagtagatacagggtgtggtgactcacacctataatcccagtgctttgggaggctgaagtggtgggaggattgcaattgctcgaggccaggagttcaagatcagcttggacaacatagcaagaccatctacaaacaacttaaaaattagccgggcatggtagcatgaacccatagtcccagctacttaggaagctaaggcaggaggatcacctgaggccaagagttccagaccagcctggacaacgtagtgagactccatctctacaaaaaataaaagataattaaaaaaaaaaagtagatacatcttccttgttcaggcttctccctggaggacctgggctgggcaggagtgggggctgcagcatctgatgagtcttgtttctcagacccccgccagcaactggccaccagctccttcctcctcttcttgctgacggggattgtgtctgtggccttcctgctgctcccactcccggacgaactcggcagccagctgcctcaagtcctgcacgtctccctgggacaaaagttggtggccgcctacgtcttgggtgaggacagtagtggccagggacccaggccccaggaaaaagggagaagggacgggaggagagctaacagagccccagggctgcccatgcgaccctattctttctttgtcccccctccaggcctcctcaccatggtgttcctccggacctgagctccgtgctcaacccccagcccaccccaccctccctgggcagggtcttgaggcagccactgtgatgctcataccttaccttgcctcctaccctcttctctttcctgcctactccccactcctccctgacaaaaaacacccagggatttgtactcattttccaagttgaataaaatacatttttaaaatgataatcagaaatgtagggtacttgcccctgtcttcccacttcttttttggtactcagacatcctctagttctcccacccctgttcccaggggac

SEQ ID NO: 862 - DNA, 434 bp, Homo sapiens
ttctctgagctgtagattctacctacaaaatgagagcattgggcaagttgattctcaagatccccttcagccctggaataggatcctgtccctaagccaatgtattaacctaaaaagaaatgaatgaaaataccacctaatcctgcctgcggtggaactcctgtcccaccatctggaggcaacaaagcctttcaccagggttacctgggtgtttacaacccctagaatccttttctgccttttggaccctatatctgttttcctgggtctttcctttaagacttcaactcccttggctgggcacagtggctcatgcctgtaatcccagcactttgcagggccgaggcgagtggatcacttgaggccaggagttcgagaccagcctggccaacatggtgaactcttgtctctaaaaatacaaaaaatacacccaa

SEQ ID NO: 863 - DNA, 152 bp, Homo sapiens
acgcctataatcccagctactcgggaggctgagacaggagaatcgcttgaaccctggaggcggtggttgcagtgagccgagatcgtgccattgcactccagcctgggtgacagagcgagacttcgtctcaaaaaaaaaaaaaaaaaagcaaa

SEQ ID NO: 864 - DNA, 7275 bp, Homo sapiens
ttcaacgtactcagatttcataggattttatttttctactaacacagacagacaggtaaacctacaagagaggaaacggagtcaattgtaaatggctgtagttactggttacacggagttgacaacacaaaggatgcctggtgcttgcgtgcagaggctgcagcccagggcgggggcagagctgagccctcaggaggtggtttcgtgtgcagaactgagcggccctcagaagcagggctgttttccagccaccaaccaacgttcagagccagcaccatgtggccgctgtgcctctagcctgctctcctccaggtgcaggggacacaggacctgccggccccatccagacatggaggagcgttttgctgcttaactcatgcttagccaaggcaggcagaggctgtgggaactgctgagccccgctgtgatgtctgggacacgctctgggcagcagccgtcactctacagcaatgccagccctagtctggctcctcagaaacatctgggggcacaagtgcagcctctgccccgatttgaactttgttgatggggctgattcccttgggagaccatgcaagccagacgtagcccaaggcctggccatctggggcctctagtatatagaagcaacctctttatggacaaccttgttaccacgtaactccctggggtgtttaaataaataaatatgccacatagaaagggaggcccaagtcggtgccactgcccgcagcctgcaaatgtgaccacaacctacaaagcagaaactcacagccagccgaagtgcaaagtgttgggcccttgaaagctatctcttcagtgccaccgccgcctccatgcaaggcacaggccatggcaggggacgcccgggactcagccagacagacctgacaccaggcgccactgctgcctgaggacctcccacgtcgggtccgtgtcctccttccctggagcaccggggtggggatggcacgtgtgagccagctcagaggctgaactgtgtgccgtgctcctggggtggggtggggtggggagggcagtcctggctgtcgtgggctgtcgggggaactcactgttcactctgcgcgcgtgtgcccctgggtttcagtgcatttgcctgcgtgaggcactgatcgcacctgtggctgtgggctgggccctgtcagtgcttatgaaaagaagtggctggttttctaaaggtggatggagactcggacagctgcaaacacagcccggcatggcagagccacagctgggggccccttcccggagcgtaggccctgatgaactgaacgtgttcaccacacacccgacagatgatccaccacgttctggaaaagccgagttccctttccagatggccctggcccacgcctcagctcatgaaatgtggacctgccgagcccagaggctcccacacgagggtgacacgggcatggacagagtcctccagcttcagtgccttgaggtacagaaacacaaagacagtcaaggaacagagtgactcggaggtgaccggggccctgagcggagccatggccagggctgacgtttcaccttcatcatcagggacagcttcagctccgggtgctcttccaagaatgttctggatggggtagaaatgcaacctaaccactgggtaaatccagccaaggaaaagaacttccagaaaccaaggcaagggctcactggcttcttgtgacctgcgagaagatctggccacgtccaggtcactccggtagcagcgtctgccctcagatgcaaggaaatcgtccagccacgccctgatttgctgagcctgttaaggctgaacaggagagccctaggtgacgggcctagaaacttccgtaggaagccccatgggcagcttgggtggcatcactgggggacaggtgtgtctgccgtctgtttccctgggccaagcccaggcccaggctgcccacgccgtcctccgtgcctgtcccagagtgccgtgatgctgttgggcattaggagtagatggtgatcacctcccggccgccacccctgaccaggaggactctgttcagcccctcggtcaggacttcaagaaactccatgtctgtggtcaacagagttaaggccacagctgatcttacctgagcgtgtgtagctgaaatcgtgataggagtgaggtttatcctctcctggttagctaagatttggtttgagaaacccagagccaaggtgaaaagagaggtggggattagagagaccccccaggcggggaggggcaggggagagaggggccagtgctcgggaaagagagggagcaccgtggccacagggaggacgagcagagacagcgacacagcccacggtgctgaccccacccgacagggaaccccagccacgggactgggtcctcaccagcctacaggggacctgggccacggattccgatcaggacgcatggaggacatgccctcactggccccagttcttggtgccaacctggcagggatgtgccaggcgtcaccctgtctgtgccaatacgcccagatgcactgcggagttctccttccaaagcacaaattcccaaagctgcgaccaattgtggccttaaagccgagagctgggctcctcacctcccaccgttgtcggcgcagggtggggctgagccccagcggaggtcccagaatgcacagctgctgtggggatgcatgacagggagcctcccagccccagggcagccctgagcacctgcggacagtggggctggtactgtaggcgggccctccctcccccacaccaatgccagggctggccccaactctggcccggtcaccactgggctcagagccccactgcatcccggtcgtagctcccagagcctggggctgaaggagaggcgggaagccagcctcactcccagcacccacaaacccaggtcttagcgagaagccaccagggggtgcccgcacgctcagcaggcacactgcaagaaaggatacagttctcgtctccctgccggtttttgggaggacctggcatgttgagcaggaccagctgcgcatcctgggacttgttgaggacgacgccattgagcttcacagccgtgtgcatccgcctgacgttggactggtccctgcaggggaggtgggcacggtcagcgggcggcgggtgcaccccacgctccggacacgaggctgagctgagccctgatgagctgcattcacacgtgttggaaagggctgtgtgagtcaggatcaggcggattctctgaccctgaaggatgcagaagtggcggctccgagcgaaaggcgctgactgcagccagggcgggcgttcagcagcgggatgctttggcctccagggacctagaactcagcccactaaggctgccaagcttctaagggctacagtcacacaacacaaaccgcaagcgctttcctaactacatctacatctgcaaagcaggcagaacagtggaagccgtctgggtggcccatgtgcctgacgccttcaaggctgacacgcttctcttgacatctacatcatcgcccctaaaccccacgtcagacactgccaaacacagacccgtcaggctgggcacacatggcctcctctccgagggtcctgatacaactgggtccaaggggccggaagctcaggaaggaaaggcccagagtcccccacaccggcctgtgcagccgttgctgctgaagctcccaggcctgacaaggacagggtatgccgaggactcagctggaggcacaggccctcagtggccactactgggtcccctcctacggcccaccctgcccctgtctggccaagggctaaaggacaagcacttccaccgtgtggccgtccagcccccgccttccgtcctcacaacgcagctctgctccacgaccctccctgtctgctctctgaagctgctgtggccggtccatgtctcaaagcgtccctggcggcctgggcccggccacagccccacaggaggctccccaaccaagtaggtttggggacactgcagaatcatgctgtgaggtgctcaggcccttgcgggacagagcttatctccctcctctaccccacggtcccctcctaggcaggcccctaaactgcagcagaactggcgttccaggaggccacctggggaaacgctgggcggaggggagcacttgcgtttctgtgttggaaaaacccggcccgtgtgtggacttgaaagtcggagcgggtctcaggccagctgcagccgtgcggtcgtgactgtggccccctgggggaggtcaccagcgccctggacgcagaggggcggcggcggacagacagaggccgcccacgcagggtcacggagaggccccacggacgccatccaggctcacgccctttgatccgcttgacgcttaagccacataaacgtgatcataaccaccaatttccaggaggaacacagggagagaccttctatcttctctccagcctggtctaattacagatggggtctctgtccacagcacagtcaaggggctttcgtgccaggaacttggaactttgaattcgacttctggatagaccacaattaccagtgtgtttggggacaaagagcagctccaggaagtgaaagcaggccaggagcacaggggggtcggagtgggcagcgtgtccacagccagtgagtgctggggtgaggcggagacctggcccttggctactggtggagtatgccggccgccacagcaaggaggaccagtgcagacacaggcacagacacgcacactaatgtgtatacgcacacacacatacatgcagacacactgatgtgtacacacacaggcatagtcacactaatacacaagtgcatacactatcatgtacaaacaggcatgcagtcacaatgtgcaaatgcgtgcagacacactaacatgtaagacatgcatagtatgtgcacacagacatgcacactaacgtacgtggacgtgcacacaggcaggtacacgtccaccggcaggtgcgctgacaggtacatgcgagcacgcacacaaacagacatccgttaagtgtgctcccggggacgtcacagtaagccacgcacatctcacgcctgcactgcccagaagaggtcagggccgacctccagatcttcggagggcttctcccagcccaaccccgagaaactgctgggccaagagagtcaatgccatcccagacgcacgccacacatgaatacaaagcccacgcgttgtccattctggcccaccttctcctgaccctacaggcctgtggggacctgcccccgccccgaccaaggggaggcaagccccggcgctgggaggaggcacaggtgccactgagggtccccgagtgtgtgtgcctgtgcatgtgtgtgtcaaaccctactcctgggtctacgtcgttctgcggctttaattaacacgctattctgaaggcactttcagatttacagaacggagcaggaagtacagggattccctgcacgcctcgcacatagctgcacagtttcttgagtctgattaattcaggtttcggggttaaagataaaaagggaagggaagtgtggccactcagccaaggcgttcctcactcaggcaccaggcactgcctgcccacaaggaaaacatggcccaggcggttactggcgggggcaggcaggggacagagacggcatcgaggactcccagggagcaccctgggggtccgtccagggtacaccctcccacctgccccggagctcagacgcaggtagctcctgccgagggtccgaccacacagagaactgatctgcacccctctccgcctggaggctggacagctttaacatggaaggcattccaggtgggaacgcgactcagctagcgcctgacccagaaggacgtggatggactcactgacgggccctgcgaggcgcacgcctcccctccactccggagcggctcggacacctcccaggtctcagttcctgggcctcacttaggaagaggcttcaggcgtgtgctggagccaccgtgaacagaggggagcgaaggcaacaggaaactgacgtgggagccgcagcagctctgggtgagctctggctgtacgcggacgcacacaagccaccgtgcacggggcaggcacaggcctagaacacgcgcacagacacacgcaggccacacacacacaggcatgcagggcaaccgggcccggaaggcgacctggttgtagcgagtggacttacaggtttccccattctctatgcaggagaaaaaaacaagagtgtgttactgacttcaggagagagcaccaggctgttccagatcgcatggctgcccaggaggacgccgcctcatcccaccccacagggcccaggagcccccagcccttcctgagaacctggctttagggtctggctctgaccccgggtgagaggtgtctcttgcgctctcatctggaactcagaggctgcgtctgcagaaccaaacccacacccgcaaggaccctgtacagccctggtgttcgcagcccaaggccacaggtgggagccttggcgtagggcaggccctagggcccgacagcagcctgaactacccacagggtgaaggccaggaattctgtgcccagcggcacaagcctcctcgcctccatggaacagacccatctgcctgctgcagtgaggcttgcctgagcaaagcaggcctggccgcagggctgacttcagggctggcccaggtaccaggaggactgctcgtcacccagctgtggggttaacatcaggacccaccctaggtcctacaaggacccctcagcgcttggcactagaaggacccctcagcgcttggcactagaaggacccctcagcacttggcacccaggtcttacaaggactcccggccttggcactagaaggatccctcagcgcccggccacagggctgaactcagggcccggccttggcaccaaaaggacccctcagtgcccactcaggcggctccctgttctctaacgggcccactggcctgcagggttgccccgaagctcttcagtggtcagggaagggactctgtcctcactgccgggccagcactgccaggatctgttccccccaggccacacgcacggacactcacggcttcatgctgaagaggtctttgaaaccagataggctggtgtctctgctcctgtacttctcagcgatcagcttctccctggtccaggtcatctgcaccttgtctggcgtaggcggcgcttgggtcctggctgccgccgcggtgtgggacgcggtgttcctgtcgtggatcagctgggcct

SEQ ID NO: 865 - DNA, 568 bp, Homo sapiens
atctgctccagtagaatgagttactttgtatgggatagaaggtgaaaaagagagaagaaattggcaacactcttagcccactgaaagcagcctgcttcagaacctaaggccttgtggttatttttactcgcttgcaaaagtgaggaaggatgttataggtctctttgagcctctttgcttttaccctttatttctatatgatctacatttatattaataaattattacatgccatataagttccagaatcattccttttgacagtcccatgggatttaatcccctcctaaatcccaaaatatagaaagagaaaatgtttgggtacagcactggggcatcatgcatactgaatattcaacaataaccatttgaatgagtggatgatttgggggtcattccttactatgtgactgctcttctctcaggcagtcttagtccctgtgtcactctcctagtgtgtagccgggctgctgcctgagtgtaatcctagcctttcaagataaccatttattatatggtgctgacccctaacaacacaagccagctccatcctctggtactcagcaaa

SEQ ID NO: 866 - DNA, 11774 bp, Homo sapiens
gtcagtgggtgagggtcgggcttgaagccatagctgcgggaccgtactcgtctcccccgacgcagaccatggagagcgcgctggcggtgccccggctgcccccgcatgatccagggacgccggtgctgtcggtggtggacatgcacacgggcggcgagcccttgcgtatcgtgctggcggggtgtccggaggtgtctgggcccaccctgctggccaagcggcgctacatgcgccagcaccttgaccacgtgcggcgacggctcatgttcgagccccgagggcaccgggacatgtacggggcggtcctagtcccgagcgagctgccggacgcgcatctgggcgtcctgttcctgcacaacgagggctacagctccatgtgcggccacgcagtgctggcgctgggcccttcgctttggacttcgggcttgtgccggcgcccctgcgggcacccgcgaggcccgcgtcaatatccactggccctgcgggctggtgaccgccttcgtggcatgcgaggacggccgcagccacggaccggtgcgcttccacagcgtcccggccttcgtgctggccacaggtaatgggcgggacctttccagcccagggcagagctgcaaccgggacgcgactaactacattaacggtttttctgggctggaactctggcaactaacctactccgcgaaaccttgcaattaatagaaaggtaaatcactgccaacgtgtgtcagcagccttgcgtatttggtgcgtgtaatttcgattttccctgactcccatccgcctgtggttttgggagacccttgaggagcgaggaattgcgtgttaccctgactcagcgcctccctctgcactggtgaggcattcctagagatttcaccggtggataaagcaaggtacggtggggtcaaggaaagagcgaagaacagccaatgtaccagggttccaggctggctgagaatatgcttggtagacacagaatcacacttaataagttactaaacctggtctcctttcctcacctcccccacttctttgaagaattaaatgagaatgaatgaacaaagcagtttataaatcattaagatacgaatgttgcttttctttaagaacaggaacacacattgcctggtttcaaatcctgataaccccctaaagctgtgcaaccttaggcaaattacttaatctctctgtgcctgtgtttcttcttttccctcatagagtttttttgttaggattaaatgagagtatgcaagatactgtattcctggagatagattgcaaggtttatatgatcgctaaagttccctaggcctattgagccattaaaaggttttgctggattctctagtacagatccttgtacagcttatcatgtaaagcagggcatctctataaccataacccttacaggagggatgacctggcaagctggcatctggtttctcatcagactactacctcccaggagctgaattctatcagtaagaatgctttagtcattgtgactggaagtgagccaggagccagtttaccaggaatagagttatccttttcttaaaaatcttcaagccatgcaaatcatctgttagaaagttggaccttgattccccctgaagaactaggtttcagattagcctgattatgaatgataactgatagaacaggcacttttagagcaaccttaggcagctgaaatccacgagttaacgaagaatgcctctggagaaattgatgccattttcccagagaatggtgtcacttccagactgggaggccacttgagggagacagaatttatgtttacgattccatttttaaaacctcaacagtttaactagcgtggctaccagaattccccctaggcaactccagcagcagagtagaaacactctagacttctgtaggaaatggcagctggcagcaggaacacaaactacatctcatttctgggtcagttagggcagggtcagtcaaccacttgacctcagtagttcctctcagtagttcctgagagcatcactgtatgacagtacaatgattagtgggcattaatggtcactgagttaagaaaatgaaatgctatattctctactttgaaaaatgcatacaaggcagacatagtgttcaaggtcactgccccacctctccccatctcagtgaccttgtgctagagagtccatgcctcagtatcacagtctgcaaaatgaggatgacaacagtacccacctcagagggttgctgagttcatctccaccccaccaggctaaaatgcaaactctttcttgttcacagtattctaagtgcctagaagagtagtcagtcaatgaatgtttgttgaatgagtaactaaataaatgaaatttggagaagaatatgctgattgacaaatgtaaacatctggtcctcttgagaaacctattgccactggaaattaaagttttggctttcgagtccctaatctgtgccaggaactccccatacgtggaattttcaaaacaactcttttaggagaaatagcagttacagtttgcacaagacaccaaagccacactaatggcagaactagggttggaaccctggcctatcatattgcttccctctcatccttaaaattttttgtagtttaaggagatatgtttcaattttctagaatagtgcttagtgtattttaaagcattttaaaatctgtcttgtccaactaaactccaagaaggggaaaagcctatgttttattccttgtacttctcgtatcttctacagtaatcggcacatagtaggtgctcactaaatcttgagcaaagtaaatcaaattgaaatttcagtgatatgcttgtatagaagaaaagaaaaacccttagattttggattgtgttctggatagaggttgtatattttagtagaaagggtttgggctttggagtcacctggtcctgggtttgaccccaagctctgccacttatttagtgggtaaaccagggaataatgtaaagatagtaagtaaaacagtacctacctctcagggctgtagtaattaaggcactaatgtaatgaattaaggggctagtgtatgtaaagacctgccacataggaagtactcatgggtgaaataaatatcttaatttttaatgttagtaatttagtgattaaaaaatgaaatagtcacagataattggtggacaagagtaactttaaaggaaatttggtccattttaaagaaaaggaaactgaaactcagtgaggtgtagcaccctacccaactgcccaccctaagaaaaccagacccaagattctagaaaggttgggccagggaaatgattgtaggctcagggatgacttctcctgaaccagcttcccaatttcatcctggtcccgggattggtggccaatgccccatttagttgttacaatcaagggaagagggcaggccgactgaaccctgggaccgtcacctgtgtctcctggtaagtgctgatcttcaccctcactttagctttccaccttccagcagtccctcatttctatcaacttgcccattctcttttcattaaacttgcttttcatgttgcgccagcatcaagataaagacattttttattcagttttgttgttacaatccacagcatgttttactcttttgattataaacttgctctgttttaacacatcatgggttaaaagggcttctgtggactagtgtggactaatagcatactgatagccttctgtggactgatagcatactgatatctttgtatgaccttgtatgaaaactcaggaacacaagatatattttctttcccaaaacttaatttctgaagctgaaactctactctgtccttttggttcacttagcctcatcactccatgtgttgtcccctttcctgatatgtgtgagcaaaggtttcttaaaagtgctgtggccttggagaggatggcacttcagtcctcagcttacacagttaaccagcaaagtggagcaggagcattggctgccccaccctacctggtccttgccctctgcactgcctccccatcctctgtttcttcactcctgctcctgtggtgccctgggggaagttaacacacgtcctctctgcactaaggaccttcagcctccactcttctcaagggagaaaaaatttatctctaggagaaatatttctcccttcaggacactcctttgccaacagatgtctttcccctgagagcttaggcttccctaaaataaaaacatgaaagacaagctttctcccctgccataggcttccctaaaaggcagtgatcaccaagctagcttaaattagggaagaggaaaatttgagaaggggcgaaataaacatcacccagccccctttctttggaaatacagattcaagatttcaaactactgaccttcaggtgaaactttggggatgttgagacttaaaatgctcaaataaaaaccctggtgcaaaatgatgctgtagcagtcaatgattctacaatggcatttttctgtgtttgcctgcaggataccttaaggagatgaaaacatgtagataagtgtatataatttatatagaaaaatcttttattaaaatttatgttttgacattacggctgaagaaaattgatttgtaaataggatccaagaccctcactattttaaaccatctctcatagtacaagtggggaatagacattttccttcttagtgttcacagggatgcccttgggtttccctctctcggcctcaggggtgtttcctagaaaagatcctcagggaagttaatgaatatgtctgtatgagttagggaaagcatggctttagtttataacttctgcaatcatcaagttaaaaatagaatgatgcatctagctattattcactcgatgcttattcatttaaaaaacggatttttacttcattatttttatgataggaaaagaacatccctcttgaaaaataaacatattaaaaatcctttgaattttattgctaaaatacttattaacaaacacatcttctttccaaacacatctttttttagatctcatggtggatgttcctggacatggaaaggtgatggtggacattgcatatggcggtgcattttatgcatttgttactgctgaaaagttaggactagacatttgttctgcaaagaccagggaccttgtggatgcagcgagtgcagtgacagaggcagtgaaagctcaggtcagtaatactctgccttcataaccaattcccttctctgtggcatggaggaaatatacattattatgtctataaagaaaattaaatgatgtttaaattattaatagtactaagaatagggtacttattaaaatcttaggctctagagcaagcttgtcccacccgtggcctgtgagccacatgcagcccaggatggctttgaatgtggcccaacacaaattttgtaaactttcttaaaacattatgagtttttttgcaatttttttttagctcatcagctctcgttagtgttagtgtatcttatgtgtggcccaagacaattcttctcccagtgtggcccagagaagccaaaagattggacattcctgctctagagcaaaactatctatgagttctagctttaccactggtaacgtatataaccttgggcaagttacgtaacctccatatgcctcagttttcctgtctgcaaaatggaaattaaaaaatacctgctttgtagggttgtgagaatgaaataagtcaatacatgtaaaggacttagagtagtgtctggccaatagtaaatgttcagtaaatgataatattattttttttgagacagggtcttgctctgtcacccaggctgtagtgcagtggtgtgatcatagcttactgtaacttcaaattcccaggctcaaaatgatgcttctgcctcagcctccagagtaactgggaccacaggcatgccccatcacacccagctaaatctgtgtttgtgtgagtgtgtgtgtgtgtttatatagagacaggatgtcactatgttgcccaggatggcctcaaactcctggcctcaagtgattctcccagctcggcctcccaaagtgttgggattacaggtgtgagccaccacacctagcagttactaaatttaataatacatacatactaatatagtttatagttccttaaatgtgtagaaatatatttatagaattctgcaaattttaaatgcatgtgtgtggtcattctgttaaacttgaaaataataaatgtaaaatatagtgtacagaatagatttaagcctttttcttatttcatagagaacattaattcctattatttttttcctacattgctaagaagttactcaaataactacttaaataactctagtttttacttgggaaagctaatttgataaaatcagtttagataataattctaggatattctttcacttctagcacgagtgaagcacattttaccttgaaattgggacctataaataaaacacatgtacagtatttgaatgtttagtacgtgagaatttagtatgtgagaatttattagtagtaaaaagtaacttgtgtaagatagtgtctaatgtacgaataattatcattttctgaagctttattttaaaataatttataacttaaaatgagaatatacactgtatcagtattctaaattatttttctggtactgccagtaccaatatgtgcaattatattatgatagcaacttttgaagctctgaatttacatcagttttctgttccattaagcaggacagctaatagtctgagttaacaatttggcacaaaataatttctcctaatttttcatgaattcaagagaaaaagtcatggatatcttaataaaaggtgtaattttgtacttctcatttgagtttgaactcaacaagatggcaaggggtggactttgagggaggaaggattctgagaaaaatgaggacaagttctgttattgatgtatcagacagtacaattaattactctgtgaactgttgactattcacactgctgaagcagatttaggaaaaggccatggggatggagagttaaagttaatataaattcatcttaattcattcactcttttaacaaacatttaccacaaacatactgtatatatgttagacattctgctagatcctggagactcgaagaaagaacaaaccccacctttgaggagctagctccagttggggaagcgagcatacctgtgaacagtgttatgttggaatgtgctatagtggaggtggggcgtatcactttaagaggatggagaacaaagattcaatctgcaggccgctttaacttggtttcagatggactctttggatgttaagaacccaaagctgttccattgctttaaatgacatgtaactggaagtagaaagtactaattgtaagcatatacaagggaagtcagattatagcaatctcagtcatactgtaaatgtttgcagaaatccaggaaaagttaaagaactagacttccaagaacaagtagctttgcatatttgggcctgaatctaccattgagtgacttagctaccctgccagtgcctgcttctttgtgtgcatatctgctgctttttgatgaatcaactgacttcatcgtctacaataaatctttttttcctccaattgtttctcttgcctaatagtttctgcattcttacagaatgttatatcctctcacagcctttgtctctatcattggtgttaacttcagctctagatactcagagcctgattttcccacattatcctccttaagctcctgagaataagactatgattgccttagctcatcctgtttgagcagccatcgccagcctgtggattgaccatcctggggtcagtgctgcaaagactatgtgtatttggggtgggaggggtgtataaaataggactgcttttttagcaaaggctatatgcaggacagcttccttagaagggactcaaagtatgataagaattataaattgcagtaaaactatgtttcttcatctagacaaagacataatttctagcaattagtatacgttgcccaaaaaggtattttaaaaatgataaggattaaaaagttatgtctaagaatgacccatctgcattatttataaatttgaatcaaaatatttattttgcatgtgatctttttttgttacttgcagtttaaaattaatcatcctgatagtgaagaccttgcctttttatatggaactatattaacagatggaaaagatgcttataccaaggaaccaaccaccaacatttgtgtttttgcagatgaacaggtattaaaactgtaatgtttagggacaaaagccaggtaatatggaacacactatgaacattctgtcttcatttattctgaaacaggttgacagaagtcccactggctcaggagtgacagcccgaattgccttacagtatcacaaagggcttctggaactgaaccagatgagagccttcaaaagcagtgcaactggctcagtattcacagggaaagctgtgagggtaagtggcacccttagcttcttatttataaatgtgtcactcatgagactggagaggcctgagttgggtgtttgataaatttcttcactcagctctcagaagagaattttaaagcaggcctgtaaaaacttcttttcaactaggacattggttatccagtgtggtcttggggccccagcgggcccctaaggtcctttccatgggttcagagggtcaaaactgtgttcataataatgacattatttgcttttcactctcattctctcaagagtgtacagtggggttcttcagaggctacgatgtgatatgtgatacccaaccaattgaatgcagaagctagatatgagaacctagttgtcttctgttaagccagacatgaaacaggtttgcaaaaatatcaaacaatgccacttttctcataattttttttgttttggcaaacagttattttcacaaaaatgtgttattcatatgttaatgtataatgggttatttttaaaatgaagtaatgaacagatatatccaattcctaatacagtaaatattgatagatataacttatataaagaaaaactctttggggtcctcaaatcttaaggtataaaagggtcctaagaccaaaaggtttgagaaccattaggatttggggtttttttttgtttttttgttttattttataatagtgttttatttgatataataggatgtgaaagccctgaaaagttgtggaacatcaaatttttgtaatggaataaaattttaaatgtgctaacagctaagtaatgaatcttatctcagtagtaaatgaaatctactacagaatgatctacattcagtaaattattctactcataaagagtcctttaacatagcaaacaatctatcctaatatagctgtttttaagatttggtgtttctgaatattagagtttccttaaggatctctacatcatatagtgatctgaaacatgtgaaaccatttatgttgtatgcaaaaatttggaacatactgtcttcaaaatctgaaatggaacataaaaataacaacatacatttattggatacttcactgtgcatcagtttccaagctaagcacttgatacatgccatctcatttaatcctcacaagaatcctacaaggtcagtactgtgctgttattatcgtttttcaatagatgataaaacggagaattggagaagttaggtaatttaccagaggttagttagtgagtagcagatccaggtcatgaaggtgggtctctgaacagaccacatgctgttaagcattatattatattgctgtcagacaaagcaaaaggtcaatgaggctttatattataggagctgttatgagaagaatctgggattgcaatgtccccccaaatagagagggagccgagagaccaaagaatgactcagacaagtccaggttggcaagtagatgcatttattagaacttccatataaggcactcctgggaagcagctgaacaactgtggagacccatcctgcctcctgactctaagctgcttttaagctaattttctggctctttgcctactgtgtatgtgtgataggactgttttccttggtatgttcccagatattctctgggatatttgggttctcagggatacctgcttcttggctgggcaccatgcccttggcttaccccccagccttcagggttcaagcagtggacatacacccttacataacctggtgaaggacctgtcacactacagcagctttataaaaagatataaaaagataaagtattataccctaacaatatttgacattttacctttagcttcagttattattcttttaaaaattagaacataaaaagatatgctgaagttaatgtttccagttacttgttttatagttattgatcatgcttgccagaatgtcttcacttgcatcatgctctctccctgtctgtgtgggcccgtccaggctccctgatggtaccttctcagtttcttcccctgctgcagcttcctttccctgtccttccatttagatgttaccgtcacttcatccccaccttccttctcatctcttctacagtttgatgctgctgggcaatttcatccacttcctaggcttcagttctcaaccatctactgatgatgactcccaaatgtttatccctgccctgactacctaccctgtatgtctttctgaatataacgctcttaatcccaactgtttattatactcatctctaaatgactgtcccagaggtgtctcaaactcaccttgttaaaaagttcttcctttcttcctttctcaaatgtgctcttcctttctctccccattgtgtttaatggcatcactagcatcatttccaagctagaaactatggttataattaacttattgctagtcctcaattcccacatgcattgatcaagaggcctatcagttctacctccaaactatctctatgttagtatatattccccttctccatcttcactgaaaactcccatagtgactctggaatcaatcattcagtgaattgaggttatctcttaacatgtttctgggtctcttgtctctctcttctccagtttgatccccactttacagctacagttatctaaaacacaagtctgaccatgtcattctccttaaaaaccttccctggcccataggattaacccttggcctttccttcacatgataaaagtcaagagtacagttttcaagccagatataatacgagtgcaatattttgatagtatactcccttcatcttttttcaggaagcgaaatgtggtgattttaaagctgttatagtggaagtatcaggacaagcccattacacgggtacagcaagctttataatagaagatgacgacccattgagggatggatttcttctcaagtgacttcttccatgattttaagggctttctttttaaagtaatcattatccttaaggactgttttctctaaattatatgaaaacaaataaattatacatataaactaactctcattctttgtaaaatactaccctgtggctaaatataaagtcattatacctcgtatttgcaactgtatttgtataaatatcacttatgtctagcatacaaaatgccagaaattcagagtctttttctagtgattaacgtatcaggtaaaattaaaacagtagttacttttaaaatattgctctatagtaattactattaatatcatattttgtattaaaggctcttcgaataatatgtggaatttaactga

SEQ ID NO: 867 - DNA, 328 bp, Homo sapiens
gtgttctctgtggcacaaagcccagcttctacatccacaggtactgaagtatcagagactgatgctgagaagaccaactagtaatcagacttttgctatatcttcagggcttttataaaaggggttgcttattgcattattaaaatacagatatacagtagaaattaagcagtgaatccttacaatggaatgagtctcatactctatcagctgcatgctaggtagatttaaaacatgaaataaatgcttactattggcattccttctagttaatacttcctatgagcctgttaaaaatagctgaagcattaaaatattctaagatgtg

SEQ ID NO: 868 - DNA, 3349 bp, Homo sapiens
aaatgtgctaacctctttttccccgagtaccattcaatgaagaaccaatgtaaaaccagaggaagcattgccataaatccaagatagagccaatcataaagttcaggagattctgtgcaaggctgacaatatttctgtgcattcgttctctgtcctcttgggcatacctataatatataaaaccaatattttgtgtacagatattattttacaacattaacacccccccaaatcattctataagacatcccatttcagtttaaatatttaagtttacatgtgcagcttttagaaataaaaaagagggcataagtaaaataaaaagaaatctatattgtatgtgctatatttgtacaatgctcttagaagattccttttactaagttactaaaatagttgactaacattcaatgaaaaacctagttattaacattatataagaataactgcagataaatgttctggattcatgatgttcaacttactgtacaagacacggtaccaaatcataaattagaaattattataaaattattaaatgttttaaaaaataatatagacatcaaaatgccaacatgaacaatgactatattaatgcctccatattcttttatatttccttattttattttttttttgagacagagtctccctctgttgcccacgctggaatgcagtggtgcaatcttggctcactgcaacctccacctcctaggttcaagcaattctcctgtctcagcctcccgagtagctgggactacaggcgcacacaactatgcccagctaatttttttctatttttagcagagatggggtttcaccatattggtcaggctggtctcgaactcctgacctcaagtgatctacccacctaggcttcccaaagtgctgggattacaggcatgagccactgcgcctggtcctccatattcttttataaattaatgagtataataacaaaaaatgttgtatgtgaaaatatttcaaaagcaaatagattttacaaaatgaaataagatacaaacataagacttaccccacattctccatatatttcagttgagccatttttaaataatagggtcttcccacaataaagtccaaggcatgctggttgaatatcgacagctttttaaaaacaaatgccagtatagtaacatcttttgtgattataaaaaataattgcaataatagctgaagcatttggcaaaaataacagtttcaaatttttgaataatatgtattagacaaaagtcttgaagcatttttaaatttacatttctccttttacactgtgacactgcagacagttatcctggaaccttgctgttaataccgtgccttatgattaaggtcctcaaccagcagagcaggatctatctccaggactcaaagcctaacccggtatgattagaggatacttctgagtttaactgattataaagttcaaatatacatatatttttaaattagagcaccagtagagggtcaccaccttgtattttgcccagtcaggacattaagcacccacatgtagacacacaattatcattatcacctatgttcataacagaacacattttcacatgggaaaagcagagagaacataatttcataacagaggtatgcaaattacctttataaaaagtttcctacattgtcctagcttttatcatttttgtggaggataagtgaaaatttcatcaaggctgtcactgggccaatattttagaaaccactgcattaaaattaagcccctgatctaaaggcttaggggaaaagcagctattccttacttaaaaaaaccccaacaactaagaacctaatacgttgtctttgaccttattcacaagaaattatggaagttttcttcatcagtgacatctgattcccttcattcattcattgattaaaacaaacaaacaggctcggtgaggtggctcacgcctgtaatcccagcactttgggaggtcgaggtgggcagatcatgaggtcaggagttccagaccagcctggccaaaatggtgaaaccccgtctctactaaaaatacaaaaattagcctgacgtggtggcgcgcgcctgtagtcccagctactggggaggctgaggcaggagaatcgcttgaacccaggaggcagaggttgcagtgagccgagatcgcgccactgcactccagcctgggctacagaaggagactccgtctcaaaacaaactgcggtctacatgtgaattaatttgaaaaattatgcatcttttgactattcttgaacaatcatttcccaaattattcacgaattcacaatctagactgcctggtctacagtgccttctctcctttcacattcaagcagactttttacttccttctccttatgctgctgagagaaaaagagaaacagcattgaataatattcctccagtttaatattttcgcttttaacaaatttcggacttagctttttaaacccactggcctctttaatgggcgcttattttttttgtaaccaattgtaatcacaatgttctaaattaatacatgaaaatgaatatttcaggtttttcaagaatgcagaaggtaaggaattggaaacttctgtatgggctttacatctagtagatgcttaataaatacacgtgaatatcaataatctaaagtttctcaaaatccaaggcctgaaaaccagtatgataaactgaactgaaataaacagcctatcacttactaagcaaaacccaggctccaagcgactgttgaatttctcctttcatttcctttagcgaacgatggctaaagttttaagattccatttttttgcagcggtcctgccctttgtgacgggcgctataaatctacgtttgaggttgaagcagtagacaaattatgcagcaacttgcttctgctttactgttttttctgcactatcacccgcgttttcaattccgaagtcaaccctcaagcaagtgttccctcgacattaaactaagggactgaagagacatttcggaccaaacaacaaagacctggcatttcgccgcagacagcgcgcctcccctagtagcccgttgcggacagaccaccccaaccccgcaggagtgcggagcccggcccgagggcgggcggggtcaaggggcgagcctgcgccgccaaccgaaggccgcctacaaagagccgagcccgaggccagccgtgtaggaaagtagtcgggactaccagaaacgcttcccgggatcttggcgaccactcacccatgggccgcctgaaggtttttttcgagaagcactagatcagcggatctggcagctgcaccgaacatccgggccacagcgagctcggcggctccgcctccc

SEQ ID NO: 869 - DNA, 1491 bp, Homo sapiens
ttgaaacggtccctttctgcggaggtagcatagcacagtgacgtttattccgggtcacttgattgcttttcctatccacttaccttaatattgctcccatgtcttaggacatattagaattattagaagatctctgggaaacaaaaggcgcatgggaggccaagatttagagtgttgatgcattccgccgtaccctatgcccagcctgtccctaaaggcagagtgcttcttattcggcagggcttcgtgagaatgccgccaagttatccaaaaccaaaggatgagagaggcttccaagagagggaagactgtccaagttcaaggagaaggggtttggttccctgtctgccagggacagaaagttctttccacatgtgtctcctggtcccgagagctttcaaaaggggatgtattctgctccaagaaagaatcacctcccagtaaagtagccatgaagggctcctgtataaaatatgcacacttcccctgccctgagtttgtggagggaaaggctgtcggaagtagggactcttaggagagcccgtgtgccctgtttggttcagctgtcaggcgtgtgccacacacatcccacctcatcttctggtcccataattctccatggatgggctgcttttagctccagttttccagtagaatgcttgagttttccttttttccgtacctcctggaggatgaaactcataacctgtcatcatcagtactcactgtgttttccactttgacttgaagtcaaatgaagttaccaaagttaaacatggacttctcaaattagaaaaaaacaaacaacaaaaaaacaggttaagtgttttgttatgaaaattatgaaaatgttcttattattatggaaaatttcaaatagatatagagagaataatgttacaaacccccacatactcaacatttagcttcaaaaattatcaactcatggcgggttttgtttcatctgtacaaactagtcggcacactatgatggcctgtggacaaaatccggccctctgactgtttttgtaaataaggttttattggaacacagccacacatatttgttgacttattgtttttggctgtttttgtacttcattggcagagttgagtaattgcagcagactctatggcttgcaaaacctaaaataattactttgtgtagcgctttatagaaaaaatttgctaactcccgatctgtaacccccaacctatccgccgcaccctgatctaggtaattttgaagcaaatcccaaatgtcacatcatctatccatatttcactatgtatttctaaaacatattcttttattcaaaataaaactctaatatcattaacagtattttgtttatattatcaaatacccagtcaatatttgactttctataattgtgtcacaaattaaacattgactttaacagtatgtattacacacttgtactttgtgtactttataacatgtgcactttaaaacagcaggagctctgt

SEQ ID NO: 870 - DNA, 365 bp, Homo sapiens
cttgctctcctctaggtgttgaggtgggacactactaatcaagctgtcttatttcagggtagttttcatgttttcctgggagatggctcacctgtacgccctgcatagcttactagtccttcctgagttttaggtcaagaactttgagcctctagctctcatttctgctctgtaatcacaggggatccagagagaacagaatgaatgcttaagctttcatttctcattaatggcagaagtcctgcctccagggaagtattaaccatggtgaaaacaattttgaaactacagatggagccatgatctcaacagacctagtccctggggagcaagattgaaccaccgattcacttaatcatggccgt

SEQ ID NO: 871 - DNA, 1594 bp, Homo sapiens
agacatcctaaccatatgggttgattttattttatggaccctgtgaagtctgggactgatcaggtttctcttttgttggctactagaaagcttggagtcaaatgtgtggtcaatgcatagcacttgtaatgggactctacggtatgtatgcactttgtattagctttctgccaggctccatttcgtgttcctatctttattgtttttgttttttccttttactttcttatctactttgaatttatgctatcatgttgtattttgtgtattcttgtaagccacctgacatccatcttggaacatggtggggaataaacacactaataaataaatacattaataaatacatgaataaataaaccaataaggaaaaaacaatgaggcaaatgaatgcagccaggactctgaaaattgcatagtgcctccaagaataatcaatgttaaggacttgaagcttggaagaacatattggaaagaagcaggtgaggctgcgaggctgcatttagaggtgacgtgttctgtgtgacgtctgtgtctactgaagcatgcttatatgtcttgtgtcttctgctgcacttgagcattaggtgtgtttcagaggatatgcagtgctgtgtaatggactgtgtctttagagggcacagttcatgtgcattttatttgtggggaatctagagagatttgggagttggtgagcctgggaatgatgtgatgatcctttttcatggaggcataggaaggaatcattgtatataaatcaaatcaagacaaataggaagtttcctaccatttactaactagttactgggtgccaagctatgtgccaggcactttacatgtattgatttaacacttaacagccactctatattattccctttttacagatgaggcaatttaagctcaaagcatttaagtagacaaccaacctagaatcacatagcaaatgacagaagccagaggcctcccaagtctctctaactccaaaccctatgcttactctactatatcacactaccttgcaataggacaaagggaatatgtggtaaactatgttcccagcatctaaaagccaggagtggttttcatttttctttaagaagatgatagtgtgatttgaaacatatctgaatttcagaagaggggacttttaaaaattgccactcataaggaaagaaagaactttttcacatatttttgaaagaaacgatggtgagaagatattcttgataatagagatatgctaacatttgctttgggtgttttgtaggttagatttttttggtgtgtactttataggcttgcatattgcttactttaaacagctgaagttctaagtaagagtgttcatatatgtgaaagagttcttaaagtactatatagttttgttattgtattgaatatatattgttctaattcctagagtatgtcatcttctatatactctatacagcaggaatccttgctgtacaacaattatattaaagaaaactctcagttatcctttatggtcttgtcaatcaaatgttttggtcaatgcatattactaactttcatctaattaatgcacaataaaatatacttagtgtgataa

SEQ ID NO: 872 - DNA, 376 bp, Homo sapiens
acattgcctcatctttgctttttgttttcaaatgtttcccatcaaagttgttgcatatgtcaattgaatgcaaatgaaagtggaaccagtatgtgttgcctagagggagatgagtaagaggtaacttcctaatgatttcccagaataatcactgttgctgaatgtttttgaagatgataccactgaaggtgctagctgtttgcatgtgtgagtgggggtgacttgaagggctcacatgtgactatcattttacttcccccatcccatcatcctcacggaacatctgacctgtgaattgggcttgtggtcactcttgcagaatcaggtaccacattgagttttatctgtacattaaagcctgctaatttgtggagga

SEQ ID NO: 873 - DNA, 377 bp, Homo sapiens
aagctggagccgcttgtatttattcggtacagacagaacgccaaaggcctgaagccaacacaatttgtgagtaatgaacattgtcgcccccctttgcagggagcagtcttgcactgatcaagggttggtttctggaggacatatgtaaacaaacttatctagataaatttctttacactaccttgttacctactcttcgccctcagcctcggggtaagagaattagctgccttcagctttattctctctgaagctttgcaaaacctcccagccttccaagaaggtttgcgtctttccttatagcttctcctaccaccctgactgatttcctacagtccgaaacttaaaatatccctcaccttccacctcaaactgca

SEQ ID NO: 874 - DNA, 6035 bp, Homo sapiens
tacttaaatgtggttgctttattttgcacttttaattcacaaaaagctttacaatatctacattccacctgttgataaccaaggctttatatggcaagacaatgaaaattttatcacatcaactgggcatatgcaaaaacaacggataatttacaaacaagtctttttaatcaagaacattatgtaaaatacacactctggtaaacatctgaattcatccatcctaaaattagactttaagaggcaaaaaaaaaaaaaaaaaatcaaatagattttaacactaacaagcctaccagaataatgctgatggcaagccataaacagctttaaatgctgactgtaatttggggaaggggagaaaaagaaattatttgttgtacctatatttaaatacatctgttagtgagacttctctaatttaatggatttcaacaaagtggacaactcctgagcctttggtagtttctcaagttttgtttttaaacttgtgacatcttgactaaaggaactgaaccctcggaccagaatacttatggtaaggaaaaacccccagggaagcggggagaaggagaaacaagactagaactttcttagtctatctaaggtgggtaacaaataaaatcactgctcatatgagggaagaataccagagttgttatgtgggatttagcttggcttatgttttataaaagctaaataagtataaacatctaaatggcaaaaataaaaatccaaggtggtctcatttaggaaattaaaaaaaaattgtcctcaattagcttttaaatttgcggaatggcacaatacatattttgaggcacccattatagaatctgttaaaattatgcatactgctacttcctcttttaatataatttttatgtactctagggtaggtattatcagtagaggccactaaaaataatgccagaattcaagtgagagagaatagaaatggaaagaggaagggaggataatgaaattgggtagtaagtaataacaaacatgagttttaaagtttcctcactaataacacagaattgtatattttggctcaatgccgctgggctgctgaagtgaccaggaagtgagtggaattcatcttaattgccccagttagattcttaactaacccatgatttggatgaggggttgtttccatagactgcttggtaaggggtagctgtgctgtgctaactgcctattcgctttgtttctttcaagaacacttttgaaaggacaagaaaacgtaaaaggcagcagaacagaacaaagaactcattagactacagagattaacacagcaataatctgccaatagtttaatcatggacatgttacaatcatcttgtttcttgagatagagcatatgggcctataaaaaaatttaaaaaataaaattccactattcctggcatattccaaaattttcctcttttgattagaatttttttggacaagtcccatgccgagtctgtcctgaagactctggctgagtgatggatgaaaggagtattctgacacaggtattttgcatgagaacggctgggggagtgccagctttagtgcagccgagaagagagtgcagtcctgataggctggaaccatttgtatttattcagtagagacagaataccaaaggcctgaagccaacacaatttgtgagtaatgaacattgtcgcccccctttgcagggagcagtcttgcatgatttccggagggcataagtaaacaaacttatctagataaattcctttacactcccttgctacctactgttcgccctcagcctcagggtaagagaattaattaataaagctgccttcagctttattctctcctgaagctttggaaaacctcccgaccttccaattgcgtctttccttatagcttctcctaccaacctgaccatctcctacatcaccccttttctgttttttgcatcaggttttgttgattgacgagtacagatgtgtgcagcaacagttttgtcaggcatagcagttactgcttgttttctggctttacatcctagaattagtaaacaacaagagacaaacatgagtataattagtaatattcttttctaactaagaagcgacccccaggagtgggggtctttctaggagagatttttttttgcatatccttccatatggctgttactgaggaaccccactgggggtatgttagtccctcctagctaaaaagtcacactgctagacgctgggaagggaatagggctgaaaaaaggcagatttagaaaatgggcttaatagggtatagtaggtacgggtaacaggcaaagtgagagaataaaaaggaccaataccttgcgtgagttgcaatgtacaacagagagcatagcaaggaacaaattttctggagtgaatggtgtctgtgttcggagcaggatcctctcagcctcctgagttgtcttcttcagcatcccccaggtaatgtctggggctcctgtcgtccgacgaagctgtgtcgtccgacgaacccgtttcttccggggctgcaggggctgcggggcctgcgggggctgcggggcctgcagggtcgtttccttcatttctggtactgggttgggtcctagccccactatggtatggtttgatgcgtcgtgctggaatccaaagagggcctgaggggatgtgaacacaagcatatcctcttccccatgttagcaaaacatttggaccatgccatatattactatttacatctttccataaaactgcagttttatgtctggagaggttttagcaaagtgcttttctatagctgactgaaatttatcatctaaatttcagaaattaagggtaagtaaggcttgtgctagtagtgttgcagggtctttactcatattctccattgttttctgagcatatttttaagggtgaagtgggcacgttctactacggcctgtccttgggggttgtacgggatgcctgtggaatgttggacgctccaagtgtgacaaaattgttgagtgagctggcataagccggaccattattaagttttaatttttgtgggctgccccataaacataaaagttaaaagatgtttaatgacagatggggtggactttccaggaagagcatgtgcgctaattaggtgagaataggtgtcaacggatacatgtatatatcttagttttccaaattcagggacatgtgtaacatctgtttgccataactgattaggttctagtcctctagggttaacacctgttgaaggaggggacgtgcctgtgagctggcaatctgggcattgcaggataatttgtttagctagtctctgggtaagttgacattgtttagttaagtttctctaattttggtggaaaaattgatgtgattgggtggcttggttaagcagtgacatcataacctgcaggtctgcttgatcattgccataagccagtgggtcaggcagtgagctgtgggctcaaatatgtgtgataaaaatagaatgtgtacattgatttagcaattactgaagtcaaagaaaaaaggcacacagggccggctcgagagtagacttaatgagggctgtttcaaggttctgcaataaataaacagagtaagcagagtcactaacaatattgatgggctgaacagaaaaagtttctagggccaatattagggctccaacctcagctctctgagtactagtaaatctcgatggagtgagggagttatgtggtttccaccagatagccgcttttccatttttacgagagccatcggtaaaaagcattacagcgttaggtatgggggaggaaactacctttgtaggaataactacagaagtactagataagaactgaagtagtttgtcagcaggaagggcatgttttatatggcctgcataatcagagagtgctatctgaaggtctagagataggggcaagactgcttcaaattgttttttactcaagggaattcttatgacatcagggtcataacctagcaactgatggcatcatccgctgtctgtatagatgactttactaactagctggatatagggagatagtgttttagtcctggtatgtgagcaaaaaacctattctaggaagtgcagccctggggccatctgtcctattaatcctgtaggggaaatgtttaataggaagaacaaacaattggactgagtattgtgggtctatgcgatctagttgcctctgagaaatagcttgatttcctcaatttctctttttgctgtgggggttaaatacctaggagagtctagggctatactgccttttaggatagaaaacaggttctgtaatttatcagtagttatgcccaaggtggggcaaagatagttaatatcgcctagcaatttttgataattatttaaggtatgttagttgctagtatttaatttaaccttttgaggtcttattgaccaggaagttagtatgtaaagatatttctaaggtgaggacatctgtactttttcaggtgctatgattaaacctcttaactgtgtattccttatgacagaggcatataaactcaaaagtactggctccattggagctgctagtaaaatatcatccataaaatgaataatcttgcaactaggatattcttttctcctggggagcaaagcctgatttacataatactgacacatggtaggactgttcagcattgcttgagaaagtactttctaataaaataggtgagctagcctttcattgttgatagctggtattgtaaatgcaaatttttctctgtcctgttctgcaaggggaatagtataaaagcagtcttttaagtcagtaacaactataggccaatcttgagaaactgctgcgggggaagggagcctgttgaaggggccccatagattgcaaattagcattgatagcttgtaagccatgcaaaagtctccatttgccagaccttttgggaatgacgaaaatgggcaaattccaagggctgtttgatggttctatatggccggcttttaattgctcaactaatttactggctcagttgtaatttctctccctttaaaggccagtgttctactactagaaagaggtttgctgtttatataattcatcaaattctgtcctccaggggaggtactgactggcctctaaaattgttttagctagcactgaccagtcctatagggttatatggaagttgtctgctatggccttaattaatcctttcgtaaatgggctactagcagctccattttctctaatgctttttcttatctctttataagcataaaaagtaatgggttcatatacttgattgccttgtcaattttgtatcactgggcaggccaagaggtccccttctaatgccgcttgcctaaaacagggtcccatagctgtagtgtatctgttgtcttttttccaatttattgggggagggggctcagggaaaacctccgtttcctctttggtatctttatctggtaacggcaggactgagggaggaagaggaggcgataaggtgatggttcctcctcctttcccttcttaggctcttctgtgtagagcaaggccaaagtagccttaactaaggcccataacgttaaagattttactgggacccattgcccttgtgcatgatatcgtttaagatttctccccactttttcccaaagctctaggtccagcgtgccttcttctggggaccatgggttatgggaaacaacagtttgcactgggtcccttaattgagcctgcgaaaccgaggctctgctagctttaagcagttgtttcaatacttttatatactgtttctgttgtgtggatagctgttgtcccatgatgaaaccctagcttgagaattcccctgaacttggaaatcccgagcgggcaccaatgacttactgactgcgcagtctcttcgccttcgttttcgggggttccgtcgtgatccatttcagtgttcctcacagggggtacctgctgccaagtctgtcctgcagactctggccgagcgaccggatgaaaggagtattcagacgcaggtattttgtgtaag

SEQ ID NO: 875 - DNA, 1441 bp, Homo sapiens
tattctctaagataccaaagtattcagtttattaggatagtacactttaacatattacaagttacaaagcctaagaaaaagcaagcaacaagtcaataaaatcacaactcagaattctaacattttcagatggtatatgtgttgggcagggagcggtggctcacgcctgtaatctcaacactttgagaggctgaggcaggcagatcacttgaggccaggagttagagactagcctggccaacatggtgaaccccatctctacaaaaaatacaaaaatttgaatcaaacattttaaacagactattttagatgtttatttaatactgaaatgttgtcaactatcataaagtatttctctgcatcacaaaaattccatatattaaggatttacacaatccaggaaaaaaaatttttagaaactgtttttttttttttttagcctgagcagaaaaatctaaaaaggctctccaaaatcttgagtggaagtatcatactctgcaatgaaatgcttgagttcttcaacacaccgctcacctatttcatgtaaattctgcctcaatgcaaactgtatagacttttctaatgaaggatctttttcaatcagcattttcaccaccatcccgaaagtttcacagtcttgtcggtaaacctaaaaggtaaaacacattctggttagctgagaatgaaaataactagccaaatacttagctaactgagttggcagaattatgatgctgacatctaaaagagagacacaaaaaagaaagcggaacctttctcgcccttgcattgtcactattaccagaggccatttaaacctctatccatgagatctgctgacaatacctgaatgagaaggaaaacattaacaaactacattactgaatatagaagtttggcatggcatttgtcagtgtaaggcagtctactcaaaggacatcagactagagatgagaataagaacaaaggctagggaagacatatcaatgactttgttcatttatttgttggaagaaaaaagtttctgagcccctaactttagattctttgtttgaatcatgatcagataacaaattctgtttagtggccgggtgcggtgtctcacacctgttagcttagcaatttgggaagtggaagcgggtggatcacctgaggtcaggagttccagattagcctggccaacatggcgaaaccccatctctactaaaaatacaaaaaattggctgggcgcggtggcgcgtgtctgtaaccccagctacttgggaaggtggcggcctctagaaactgggaaacgcaagggaatatattctccctagagcctccaaagtaaacgcagccctgcagacattctgatttgggtccagtgaaacctgttttgaactttatatattattctcaggttctcatggactattaaccaagttagacaacattctgggtc

SEQ ID NO: 876 - DNA, 898 bp, Homo sapiens
tttcagaataaaaagtgtcacctagcaagaaagacttgcgttctgcgcatgtgcccccctcccccatattccagcttgcctgcaaggctggtagttctaaccaacagtaaaagaaaaacgaactgactaaaatccatactctgattgttcagcaagagacattgctaaatttcctgtccaccatttgtacttttatgtattttagggctacctagagagttcttaaaggcccagatgatgaaaatcggctgcccttcttcccaaatgagttgcacagtccatctggagagggcactcacacttttgtatgaagctgtaggccataaaatggaaagtaaagaattaaaaactgcagccatttggtagcagttataaaaaaaaaaaaataggacgggggaaggtagaaggttgtgtggtgggggcagttgctccagcaaattagatttacagaatgggttatagagtaagcctttattgaaagttccttttcacatctctgcaagatatttttttgcttacatttttttctggcctattgcctatcctttgctcctgaccgttcctcttcatgtctccacacccgtgtcactgcccccccaccccatgcattttcctggaaagtctgataattcttgagctcccaatggatctcacttcttaaggttctggttccttttcccttcaagttccctccaaaacaagcattctcagacaattctgattatagaaggaggaagaacaactgtgccggaaccaactggaaaatttggaaagctgacagctagctgcagctgtgctgtactatgttgtataactaatgcactaagattaaatgatttttgtacatcaataaacaatgtggctcatggtatgtcaacaaataaattgagtaacaaag

SEQ ID NO: 877 - DNA, 898 bp, Homo sapiens; identical to SEQ ID NO: 876

SEQ ID NO: 878 - DNA, 367 bp, Homo sapiens
ttcaggtaggcaaacctgtagggcaggttggaacctgcagagaagcctgcagtgagggtggggtctgcactgagccttctcaaagggatgtgttttacaggcttctctcatatacacaatcagggaataccttctggattcttgggtgttttgttgttgttgagacagagtctcactccacacccaggctggactgcagtggcatgatcttggctaactgcaacctctgcctcccaggttcaagcaattctcattcttcagcctcccaagtagctggaattacagacacatgccaccatgcctggctaatttttgtatttttagtagagatgggatttcaccatgttggccaggctggtcgtgaact

SEQ ID NO: 879 - DNA, 367 bp, Homo sapiens; identical to SEQ ID NO: 878

SEQ ID NO: 880 - DNA, 279 bp, Homo sapiens
cggcaccttcttcaggaggttgaggtgacctggaaggtcacgctgatcctcccaccgccccacagggtctctgcgtaccccctctacaggctggaatgtttggcctgggtccctggccctctgcgggcctcggtttcccctcctgtaatacttgtaagaactcagcctctccctgctcatctacatggtgctggggccactaaacagacagggagtgcgggaagccccaggtgacggtgacagaaacctggcaccccctagaaacctgaccctggcctc

SEQ ID NO: 881 - DNA, 279 bp, Homo sapiens; identical to SEQ ID NO: 880

SEQ ID NO: 882 - DNA, 278 bp, Homo sapiens
cggcaccttcttcaggaggttgaggtgacctggaaggtcacgctgatcctcccaccgccccacagggtctctgcgtaccccctctacaggctggaatgtttggcctgggtccctggccctctgcgggcctcggtttcccctcctgtaatacttgtaagaactcagcctctccctgctcatctacatggtgctggggccactaaacagacagggagtgcgggaagccccaggtgacggtgacagaaacctggcaccccctagaaacctgacctggcctc

SEQ ID NO: 883 - DNA, 279 bp, Homo sapiens; identical to SEQ ID NO: 880

SEQ ID NO: 884 - DNA, 84 bp, Homo sapiens
gatcacctgaggtcaggagtttgagaccagcctggccaacatggtgaaacctcgtctctgctaaaaatacaaaaattagccggg

SEQ ID NO: 885 - DNA, 84 bp, Homo sapiens; identical to SEQ ID NO: 884

SEQ ID NO: 886 - DNA, 84 bp, Homo sapiens; identical to SEQ ID NO: 884

SEQ ID NO: 887 - DNA, 84 bp, Homo sapiens; identical to SEQ ID NO: 884

SEQ ID NO: 888 - DNA, 6662 bp, Homo sapiens
tctgcctcgatggaagcaacaaaacctcaagaaagaaaaaggactattttgagaagagtagctgtggttgtaaagcagtaccctaccctgattgtagggtctcattttctcaccgatattagtcctacaccaattgaagtgaaattttgcagatgtgcctatgagcacaaacttctgtggcaaatgccagttttgtttaataatgtacctattccttcagaaagatgataccccaaaaggagcctatggtcctcatttcaacttctaaggtcgctagattgtttctatcctgaggtattgcatcaattttaatactcctatagttttctcttcttagaagagcacaaacactccatggaacattagagttctgaggcactaccctagcttgtcctctatcatgactcatttttatctatggcaggtaggctgaagcactttgcaggtttacatcttccccagagtaacagcttttccttttcacatatactttccttactgccttactcagtgggtaagttaaagggctgaaggagagttgaatggtccacaagactaccctcttaagaggtttcacaaattccaaacagtaccagtgagagcagcacttccactggggctaggcttgagacctaaaggcaagtatgaaatgcatatgctacttcactccctctcccaacccttaataatgaggcaaagcaagagcctagtgaaggccaatgctaggtttacaaacttacccagaagcctctgcaaagcttcacaggctcctcagatgaaaataacaggaatcaatggggactacggccagacactggtttgccattctgttccttttaagaagtaacagtgctgcaaggaagtccatgtcagaaagccaacagaaggtgatttccacaactttgaacaggttgttacaagtatcagcaagaatgtgtccttttcagaaataacagtcaaatcaaagaaggttaataaaggctttaatttcatacacacaaaaaaactctatgcataatttaaaaaggaaacaaaaacaaagaaaaaccgtaaaggatacagaggaacagttctgctaaaacacagataaaagtgccgctccatacaaaacataaagaatcagaatcaaaagtcactctgaacataaagaaaaaaaatcatctcacaaataatgtggccacagctgccagaaaacctggtagtggctcaattaggcaaagtgtaggaatctcatttttgtttttctctccttaagtttaaagaaacaacaatgacaataggccagagaagttagggagggaaagaaaagctcaaagggagggaaacctggggacaagaggtgtgcacacccacatgtggtctcactcttcacacaggcccactatttttgaagtagaccagtttagttgactgttcttctttgttctggcatctgactggaccaacctggaacctggtccagaccctcacccactctattcttatgccaatggacatacctatactttgaacctctgtacttttaagaaaagtccaatgttacaaaatcaaatgcttatattcagactggcacactttttaaataaaaactccatacacctcagacatatagcacacatggagacaacttactaattgtgtgtaagtatgatacaatgaatgagactgcctgaagtctagtaatcaaagcatgccataaggtgaatgattgtggttaaacacagcaaaataattgtcacaaaactttcaaggcctaacaaattagaattttccaataaaaaatatatattttttcagatgttaataagacatatcagtagagacaaaattaggattttgaagtaatgcaataaaaagatgttggagggcagaagtctatttagtttttgtatacacttgcaagagtgcattactcagtataaagcaaaatggggaggaaaaagacatccatccattttattggaacacttttatgtgacttgaatctggtgttaggttgttgatttttctaaaaatctcctatatatacaaaatccatatgtacttggagatccagctgttgccccctgtttaaaacaaaagaccacctcggggggtcaattaaattaaaaaggccctccaaccaccctaaatgggataactaagagtatctactgcagtcatttcagaggacagagaaggaaaatattttaatttgctttaatataacctcttttcagtagatcacaaatgagtttacaaactacttttttttctctttaatttaggtgtttgcagataattttcattatatccgtagctgtatgtgtgtatagttacataatggtaactacacacgatacagaagaatcagtaaattcatggattattttgctgaggttttaaattttaaagcctctgtttcagaattttatacttgatcaaggagaaaaataaatgtgtagtctaacatttgctttctggagttaattaactgatctgtaagaaccactgcatatgtcttaaaatgtaaacatatttacatttgttgtatttgttattgagcctttaaggttaggcccagaatgaacagaccatagcaagtaaacaaataatttttagaatcaaagtattaatagaagaccagttcatggatttgcttattctatcctgctgagacaaaactcatgagtgtgcacacacatgtgaatatatccctacgaaacagtctatcttctcataggcttaaattatagtcatggctattaaagaaattaacagcatccagccacatgcaactttccaaccttcagtactattaggtgattaaaatcaacaaatatgaagtttagttcatttttcccttaaaattccaacaaagatcaaaaggttgtatctagaactaattgccatcaagttccaattcaatgtcatttaaagtaatgtaaccacacatttggtattttcaataggaaggttaattaggtattgtgcaaactgcctgcaacggaagcactcagtccttatctaacttgtcccttcctggccccaacatgctaactgccccatccccaattctgggcaaactgatcacaatgtgcaaaaaataatatattatctatttataattttaaaatatatacagccagctcaaaaacaacaacaaaccccatcaacatagtccagctgaaatctccactggtagtcaaagaagtagattaaaggagtaaaggaaggagaaggctgatagggccacaagaatggacagacatcaagtaaaatttgagtcccaaacatgcaagtacatgagcagtgagataacttatatattccaataacctattttcaacaactcctgcccaagacatgaagatcaaatcaggtttctgaggtaagtgtacttctaaaccatacacacatgaaagctatgaaagcaattcaaatgaggctgcttcatgaggcaatctagacttatggcattatttctacttttctccatgttttaattgcagcctgcactttaaatctttcccaataatttttaacagtgcctctcaaatgcaaagacacgtaaaagaattaataactagccaaagaattttatcaccgcttcactcatttataagaaaaccaattatttccaagcaaaatcaaaccaaaccaaagaggctcctggtagaaatgaaacaaaactttaaagctagttttaaaacaaatattttcctctgctctaaactactctggcgttttctaccactctaccattttggaacattcattacaataaggtatataggtagatggtaggaggcaaagcatttatcagtagttgagcaaaactgctgaggccatttataattcaaagaatgaaaacttagaatagtttactacattagaatacatccaagttccaagagtaggactggagctctcttaaggcaatctttcagaaaagatgttgcatcttctgtgatgatggtttgtgttttttttgtttttgttttcgttttttttaatgagatggagtctcactctgtcactcagactgcagtgcaatgatgcgatctcagctcactgcaacctctgcctcctgggttcaagtgattctctcatgtgatggtgggtttttaaatgttttttccttctgaaaacctgatgtggttttgtccctacctctgagaactaaagaataatccccttgtttataataaaagaaaaaacacgaaagaatataatgatggtttcatttttctatatttaactctgtgtgatcctaatgatatctgggctcacaaaattattttgtggacagaattccatcctcaaaagaattctttatatggtttcataagctgcttaaccaagctggttacgtcagctaagtgactagcatagcacttaatgttgccgctctactttgcctcaactcagagcacctaaaaagtagataaataaattatgcacctttgttatttgttagtttttgggattacctaagccaatcacattttaattgcaaccctattttaagggcaaagccagacagtaaatggttaaatgcccaaggtttgtcctacagctcaagtacttaatttcatacttgcaatagggcttttagcttcagtggtccagaattttagctttaccagaagaacactcttcttatcctccctatgtttgagagacagagatgctagcattcttccttatccctaagtattcctgctggggagtcccaattggagaaatattatctttctacttgtttaaagttttggttgcaatccattagggtaatgctgctccatggcagaatgacaaaaaagaaaaaagattctatctttaccaccataataatgatgatgatatatgatgaacatactgtgtgaagaaatctccttagagaaaacaaagtatataagaaatatcaaatgtgggactgtaacatattccaaagcaccaacaatccatttcttgggactgcatgtaaacagcaaagacatcacaaattcatgaaatttgcagacaacaacaacaacaaaacagctcctcaagtcaggtgacagtaatgcccctctcttgcaaagagaacaaactgtcattagtgtaacatgaagagctggctttccagtgaattttactaataaggaaacacaaaaggttacagacttgagtgaaactactcaaggaacataaaagctaaaagccaactgataagtatgtcttcacacatttctcaggtgaatggactctttgacaccttcatttcttctccaaactgctgtgctattaattttgagcaggcatattctggtggctcatcctaactctttaaggctccattcatcccgtgtgtgtgtgtgtgtgtctgtgtgtgtgtatacacacatacacagatatatatttacaacatgtattcctaagacaaaagaagtgccactcataggagaaaaagaggataatcagctacggatgtgagaccaaagtttccataaaatagcatggagcattctacgttactccaatttttgtcttttggtttggccctgagctgtttgttgctcccgcatcaagtagaattccaaattctccttcagcagaggaaaggtgaggtgggcagcagtaacaaatatgcagtgcatgctgccaacccaggagtttgttcctcacaaggcctgacgggtagtcttccccacttccgtgctaagtgactgagagttcttttctgtttccagcagctcatcaaagatctcccttaagataaaacaagcaaaaaataaaactggaaatttagtaagcagaaccaaagaataggcaggagaaaaagtaaaataaaattgatatggataaggccttcacaattccatttcatgcctgtattttatttaaaaagcagctcactcatttgatcttaaccctttgaatgctgatttttaagaatagaggggaactgacaacagttagctttaatgaacatgctaggtaattcccatccatataaatcagatcttctagctgataaaactggatgaccaaaactatttatgacaggacatcttctatcataaaacaaactgtcttaacttccatacctagatacaactgtgtaatgagcaattaatgctgagttatgagagaaaatattctggacttacaaggaaatatcaagagatagaccctaaccaaagatgataaaaaccaaaaattttcaaccaatcaactgatggaaacattttatcctcaaaggaaaaaaaaaaaaaaaaaagagttccggtgatttctaactcattatttagaatctggcaaagtttcttacttgtgcatataaaagaagatgtagccactccgatctcgatcactctgcacggcagcctcttggatttttgatacctccaggtcattgtaagtaaaccacgcttgcttcttaatgtcatatacatcactaatgtaatgacctgaaacaaataacatcttaaaatcaaggtttttaaaaacacaccgaagctgggcgcgatggctcacgcctgtaatctcagcactttgggaggctgaggcaggcggatcacgaggtcaggagtttgagaccagcctcaccaacatggtgaagccccgtctctactaaaaatacaaaaattagccaggcatggtggcgtgcgcctgtagtcccagctactcaggaggct

SEQ ID NO: 889 - DNA, 585 bp, Homo sapiens
caccgcgaccagcagatggtgtgtttttaaaaacaccaaatgttttgtgccttcaggtaagtcatcaataaaatatccttgtgaaagaaataatttttaaagctaaggagtaatgaactagagaatagaagcctcttctatttttttcttcacaatcgtttgtatgccctgagttttctctcaagttaaaaagtcaccccaaagatgtcttaaatgggcaaaatcaccagtgtccaatgcaaggatttccttttccgttttgacatggtaattttcttggtaatataaatcactttaaaatcattccagttcaaaggaatataatctctcaaaaactaaatgacttttccttcacagaagttaatttaattttgtttggattattgtacaacctccctttcattacaccaggcacatatttcaacagtagaaactttttttaaaaaaatcattatagaagattacattttgcaacggttttgtttctccagagaaaaaagtaatactaatttaataatttacttgagaaaaacctctgacaaattgtaaatgtccatctatatacgtaattcttaatatcaatac

SEQ ID NO: 890 - DNA, 585 bp, Homo sapiens; identical to SEQ ID NO: 889

SEQ ID NO: 891 - DNA, 585 bp, Homo sapiens; identical to SEQ ID NO: 889

SEQ ID NO: 892 - DNA, 298 bp, Homo sapiens
ttgctatttttttttttaaacaaggtgtgtaagtaaaaccaaatggacaaataccttctgacatatttaataccatgcaagttttaagacatggtcttgctctgtcacccaggctgcaatgcagtgacacaatcatggcccgctgcagcctgggcgcaagtgttcctcccatcccagcctcctgcataggtggggaccacatgggaacaccaccatgtcctgctaattttttttattttttatagagacgaggtctcgccaagttgcccaggttggttttagagtcctaggctgaaac

SEQ ID NO: 893 - DNA, 111 bp, Homo sapiens
tacttgggaggctgaggcaggagaattacttgaacctgggaggcagaggttgcagtcagccgagatcacgccactgcactccaggctgggtgacagagcaagactccatct

SEQ ID NO: 894 - DNA, 298 bp, Homo sapiens; identical to SEQ ID NO: 892

SEQ ID NO: 895 - DNA, 111 bp, Homo sapiens; identical to SEQ ID NO: 893

SEQ ID NO: 896 - DNA, 111 bp, Homo sapiens; identical to SEQ ID NO: 893

SEQ ID NO: 897 - DNA, 297 bp, Homo sapiens
ttgctattttttttttaaacaaggtgtgtaagtaaaaccaaatggacaaataccttctgacatatttaataccatgcaagttttaagacatggtcttgctctgtcacccaggctgcaatgcagtgacacaatcatggcccgctgcagcctgggcgcaagtgttcctcccatcccagcctcctgcataggtggggaccacatgggaacaccaccatgtcctgctaattttttttattttttatagagacgaggtctcgccaagttgcccaggttggttttagagtcctaggctgaaac

SEQ ID NO: 898 - DNA, 351 bp, Homo sapiens
ggctacagtgaccagtatattgtacccagccatcacaaagtatgaaaaaagattgcaaaataatacatacccagtatctgatgactccatcctctcttcagatagttcaagtttctgtagcacgtgcagtgaagactttacatatagaagctacacatctgcaacaactaaaacatttcaggcagaaccctgtgcatttgtagttgacacgtcagtaaggagaccaaccacacctataaaacctcctcctgcacatgtggaaaaaacagttgtggggaaaacatgtcacataaaaggacaatctataatctctaaacataaatataataaaaccaacttgctatattcata

SEQ ID NO: 899 - DNA, 463 bp, Homo sapiens
aacttgctgcaaaattgcttgcaagaaaaagtatgtatcataaaatccaccgagaaagcaacatattagtcatactttctgatgcatcataatagaaaacattttgttaactaagtaataggaatcatccattgatatttgttaggcttcctttttgcccctttttcttcattgaagtctactttcagttaattcttatacttttctgtggtccaaaattgttatcaaaagataatattgacccttcaagacgaggtctcatgggtatagaatggtgagatattaacggatctataaccatcataggaagagaatcaaataccacaagcctattatatcatgggaagccattaatcaataaggcctttcagatcttgctggtgaactcagtagtaggtgagttgagatgcttggatctgtcttcagtagttttgtgaaaagggacctggtcacctatgagctg

SEQ ID NO: 900 - DNA, 551 bp, Homo sapiens
ccttttaaaaatgttaatcatcttagatggaactttttaaggcagatgacaaaacttacttagcttattaaattgagtgcattactatttaataatgtctggatgaatcaacgtaaatattatgaagataaaatattttatatacaaggcgtaattcagtgaatctacaggttcagctaatatggtaagtacctgctactgaaacaacaaaataagacccctgtttgagaaagggaaatatgaaatcagatatatgagttcccctttaagaatggaaactgggttgggtgtggtggtttatacctgtaatcccagtgctttgggaggccaagacaggaggattatttgaggccaggtgttcaacacagcaagaccccatctctacaaaaaataaacgaattagccatgcattgtggcaagcacctgtagtcctacctactcaggaggctgaggcaggacgatcccttgaacccaggagctcaaggttacagtaagctatgagagtaccactgcactccagcctgggcaaaagagtaagaccacatctttaa

SEQ ID NO: 901 - DNA, 551 bp, Homo sapiens
ccttttaaaaatgttaatcatcttagatggaactttttaaggcagatgacaaaacttacttagcttattaaattgagtgcattactatttaataatgtctggatgaatcaacgtaaatattatgaagataaaatattttatatacaaggcgtaattcagtgaatctacaggttcagctaatatggtaagtacctgctactgaaacaacaaaataagacccctgtttgagaaagggaaatatgaaatcagatatatgagttcccctttaagaatggaaactgggctgggtgtggtggtttatacctgtaatcccagtgctttgggaggccaagacaggaggattatttgaggccaggtgttcaacacagcaagaccccatctctacaaaaaataaacgaattagccatgcattgtggcaagcacctgtagtcctacctactcaggaggctgaggcaggacgatcccttgaacccaggagctcaaggttacagtaagctatgagagtaccactgcactccagcctgggcaaaagagtaagaccacatctttaa

SEQ ID NO: 902 - DNA, 333 bp, Homo sapiens
ctggtataatgacaaactagaaatcacagtatgggaaaaatataggagatgatgctttgatttcaggaatattgtggattatcaaactaaaattagcagattctatttagcctcttagaatttcaaaaatttttagacattagtatacatccccaccttcacgatatcagaaataaagggtagtgaagatagcagagtgaaatatgagaattgtctccatttcagaaggtatttggctgaaatgagacatttcacaatttggtcttctggtctgctcatcactggaagtcccagcttcttcctggataagaagttgtacttggattatattat

SEQ ID NO: 903 - DNA, 333 bp, Homo sapiens
ctggtataatgacaaactagaaatcacagtatgggaaaaatataggagatgatgctttgatttcaggaatattgtggattatcaaactaaaattagcagattctatttagcctcttagaatttcaaaaatttttagacattaatatacatccccaccttcacgatatcagaaataaagggtagtgaagatagcagagtgaaatatgagaattgtctccatttcagaaggtatttggctgaaatgagacatttcacaatttggtcttctggtctgctcatcactggaagtcccagcttcttcctggataagaagttgtacttggattatattat

SEQ ID NO: 904 - DNA, 413 bp, Homo sapiens
caaagcttgtctgttttgctgtattttcatatgtcaagctgttaacacagatgcttttcaaatgtgacccataactggtcagaacacctttcaaataaatcactaaattgtcaacataattgcatcttgggaaggaaagtacagtgaagatgaaattttcccaaatgaagctagagggaaaactctactaaagcagacaataagaaaaaaaaaaaattgaagatacaaaaattccctaatctggaagtgggaatttccgtagcatctgaatgtgtacttaagaaagcctcattaagtcatggaaaaaagtctcttacggttggagttttcaaattcttttagccgctacacatttggttatcctttttccctttgtacacttctcataacaacacctacatccttgtaatttc

SEQ ID NO: 905 - DNA, 538 bp, Homo sapiens
cctaagaggctgtatctctaattttctaacttttagaagattagacagtaagttccttagggtccacaccactgtggcagtcttttgcacataggaggtacacaataaatgagctccactgaagcagaaagccagatcttaaggctgttgtaaacctgacacacttaataatggtgaaaatggagtgcaaatccccaaatccaagccgtccaaaatgagattactcagtgatgacactcggtttcctgagatgggttaaaatacgatcatatgatctgtatctttggcttaagaaggcagaaaagtacacaaagcattatagaaggcctcctataaaattcttaatgtaagatctgacatcccaaattttaattatctggagaattcacttctggaactaccctactccttgataatgccaaataaaaagtgttattaaaataatcctgaaaacagctaggcagtcattcaactcaggagctcatcttctactgcgtgaagttatgggcacttttgctgactgcttggcaaattgaca

SEQ ID NO: 906 - DNA, 286 bp, Homo sapiens
ctatgttgcccagtctggtctcgaactcctgacctcaagcaatcttcctacctcagcctcctaaagtgctgggattacagaaaaagtactttttaaagacacacacattcttacatttctttacaagtgaaaaaatactcaggtggaagtattaagataaatgaagctaacaattcctatctgtctctcgtttctcttattacctcttctttcaggctttaataatgctttgcagattttacatagctcttctttgtaaattcccaagcctgcttatttgattatg

SEQ ID NO: 907 - DNA, 954 bp, Homo sapiens
aattaaatgagttagtatacacaaatgcctagagcagtgcctgcgtccagtttaatttggctttacaaatttaaacctgcaaggattatgtaattagacatacataaattttacacaaataaaaatcagagtgaatgtaatttgacatcagttgaataaaatgaagcaaaatatcataatctttggtttattactgtgtatttggtaatcctggaaattgatacaatttgcattttagtttaagtgcatgttatttaagtaacatttaagttttataagatcatggaattaaccattttttcgtatttttcaattagaaaaattttgtatttttacaattagaaaagtgtaattttttattagtatgcaacagatatgacacagctaggctaaatcaaattattacatatagtccaaaatttagatgattatactgaatattagtattcacttactgtactactgaagagtcaacatttcaaagctaatgatgaaaattatctactaagtgtgtgactttttccccaagaatgatttcatctgcttccaccaatttcagtattctagttgatagagtcaaaatcatagcatgcggaagcagcacaagatatcatgtgcaacatgtgttgtgccaagtcagtaaacagccatcgtaggagtggccagcgtggccttataccttactagaacccagagaaaaaagagcctgctttttaaagagaaaggcaaaattgcttctggcctccatttcccactctttgtttctcatgggaagaagcaagaattccagaatcgtgtgaaattttcatggttttatgaaatcattctctgagtcattaaaatgtatgctaagaaaaaaaatctaacttatgctttatgctcagatgcaattttaatagtctcaaactaagataaacaaatatcccagcacacttttttaattaaaaaaaaaaa

SEQ ID NO: 908 - DNA, 1101 bp, Homo sapiens
ttttttttttttttttttggcttatagtccattttgaaaatgtggtagacattttaaaacatagtgcacatcagcatgtaacctcaaaatctggcatgcaaattcagaggttcacaaaatctctgcagcccacccactgtagccttcccagagttaagagcacctggcctgtgctacatggattggtgaaatattagaaaagatgagagaaaatcagtatgagcataaattttatcttctttttggtgagtactttgaaagaaaattaggacctaatcccctagtttaagtgaaagaggtaatttggttgctacatgatagagattcattgaaggagaaagaagtagacagtagacaaagttgttgttcaaagtataatcaagagtcaggcatccaattgaggtctgaacaatagcttttattcatgttctctcaccagtctgtgttacatgaagctttaatgatatttgatgattgaattcattttttaaaatagctgcattgcagaaaagtggtttgctattaaaatattacgtaccttaggagactgaggtggaaggattacttgagcccaggagtttaagacaagcctgggcaacatagcaagaccctgtctctaaaaataataataataataactgagcatggtggcttccgcctgtggtccctgctacgtgggaggctgaggcagaaggatcacttgatgccatgaggtggaggctgccgtgaggcgtggtggtgccatggccctccagcctgggtaacaaagcaaaacctgcctcttaaaaaagaaaaaattacgtacttgagtttggatcatacagattaatgaaagaactacaaaagatttttactgcttaattctgtatttggggtctcttcatttttaaaaataataaagcaatttgctttatcttacattggggttttatattcccaattatttcaccttaattttacaatttttactatatgaaaaaaaaaaactgccctgaagcctttggtttatatagaataaaatagggcacatattgttgtgtaagaaaagtaaataccaacttagcatgtttaatcatgttgtagaattatgtattttcagag

SEQ ID NO: 909 - DNA, 12500 bp, Homo sapiens
ataactgctagcttcagaagatttgggcctttggtagtagattggcctcataaagcagaaagcaagtcctattttccaccaaaaggtaaggattgttattgttaatatttgctaggaaattggttgtatgagagcaaaagaaagaatagcaattacttagccagttaggaatcataagagacttgctatgatttgataatttcatagactcagatcaacaaatgtttgagtattttctctgtctaaagcatcatttcaagtaacttgggtatagacatatgaaacaatatctctctgcattatgaaattaagatctatgtgaagtgattggtctttcataaaatataaatttatgaacagttgaaatatcagatttacattaaatgttctagataacagcagagcagtagaaattattaccaactgttgatgaataaataatttagataaaagacaaagtagctagttgggtctattttttttttcaattatataaagatgtaaaacttgaggaagatgcttagttatgttagtcagttattgctaggaagacaccgtggctgatcaccacaggacaagaattacaaattgtgctaaccttcacatgcaagtcgcatgatcaagtcaccatctgtggggagaggaagtatatcctgcccccaataacaagaggaagagaggagaaaggagtcttgaacattaattcagctagtcagaattgctaatggaaggttctctgaaatgaataaaaaaaagaggggaggttcaaagattaagactttactttaaacattgctgaaatataattttagaaaaagcacaccacacatactattcagtttcatgacttagtgaattgtcaagcctggagaaaagaccccaatagaactgttaaatggtttgattttgactctgggaaatgaagcatgataaagaagttattagcacataaaaactaggtacaggtttctggtgatgaattatatgagtcatatctactttctgccattgagaattatagaaccttcactaatagttcacatagttttttagataaatggagtaatgcaatgtttttttaatacttgcagattctatatgtatgtagggaatcaagagcatcttttgagtagggattctggatcccaggcctctatgagaatctgattaaagctatctacctctctccatgtagtctggagttcattggaggtcacaaaaccttggtatagacaggaaattatctccacatagatagagatgtttatttattagcttagttttagtgttgtccatagttttactctcttgccatttcataaagtttactttataaatgccatttttattgaatactcaagagtattgagttattttgtaatgttcccgactaagctaccatcatcacttgcctggactgcttcagctgtctttctagtctctccacatctctagccctcttcagttttctcctatcgtccagtcacagcagtctttgaaaactcattggatggtgctattccttacttacctgcataaaccctttaatggtttctcttatttttaggataaaagcaaaaatgcattctttctgcctggccttgccttctttctagcttcttctactattgctgcttgtttccttccagtcccacaaactggccttgttctctccagcctcagtgcttttatgtatgatactctctagactgattgtatctcttccttaggtctctttatatattccctacttatcttttgtatctcaagcttaagtgtaagttgatcacagaaaacattgaggatctaccaaatgaggtcagttcctcctgcccaactcctagtgctgtctgtgtctttcactcctagcactcatcacagttgcagtattacatttttacaactttaaacatttgtaattattttattaatgtcagtttctttcaatggtctgtaaaatagtgtctttattcacctttgtgaatgttcatattctcaataattcacggattgttaactgcctaataaatgagataacaaaaaatactatagggtggagaaattacttcaagtagatgggggaaagcttcactgagaggtttggaattaatctaaggtattgtatatagatagataaaaagcacttgaacagcgttccaggcaggaatggaaatagaattttaaaaaggaattagaaattgtttggatggagaaagatgcagatttttgcatgagctacttgttcacttacaaggatggtgtactttaagcctagaaagatgggatggaacatatttaatgaaacagaatagttgttgtctttattggtattgttgctatcgttattgtggttttgcagtatttagtttctctaatcgaaaaaataaaattggcactggcaaatcatagtttttttggtacaattacagttaaatgtagacatttccaaagaccagtatccccaaaccttgttctttcaagcaattttattatttctgtaattcagcattttccatggtttggaaaacactggtatagaagcatccagtgggtgaagctaccttgtaattacagcagtgactagagtcccttagatgctaagccacacatgtacgtaagtttcctttgcagtgaataaccttcaccttaagtgattattagcttgctttaacaaattcgaaagaagctattatgtagtatgtttttgttaagaatattttaatatctaatgacttgcatcaggtaagtcataatttacctgatatggcttaatttttgtaatataaacattccctaataataacaaaaattgagcaatattaaagatattgaatttagagtattactttaaattaagcaatattaaaatattaatatcaaaaattatgaaaattggccaacattaaaatattgaatttaatatactattttagtaaattggtcttatatccttttaattattacaaaatacttgtagttcccagattattattttgtatcaaaattaaagccttaaaaaaatcttcattattttcaagaatattgaaattgtttccagcagtgtaaaaaatctaagacatgttttttaatcctgtgtaatcttacctttggaagtttgtatttatatagggtgaaatcatttatataaggtgaaatggctccaggtattttttatgcaaacaggtatttttattttattaaaatgaagtactttagtgtcacatcagacttttgtggcataaagctatggttgacaataagctgagttttctgacttcagtaaaacatgaccttacatttcccattatacgatggaacagacatacatggcttgcctgatgtctgctttgtactgggactagattaaaatgctgtacatttgttcgcatagaaatcttgccaaggtaatggatagatcatttatagctatcacctgctgggaataatcacataatagtaaacttgcagtgtaaattttgatgccttctttttataatgtagtctattctgtctgctggatacatgattttttattaaagattgacaattggttgtttacaagtctagatagtctccagacagtttgaaaaatgtattccactgctttccaagttgaggcttgatttaaaagttttgatccatctgacccatgttttattaaggaacatgtttcattccagccttcctactgtagctttcttagtatcattgggaagttttcatgagactgtggaatgtttcctctgcttaggggatttcctggacctttccaagtgcgttccagtctaaaagtctagaacttggattaacctgagggcatttatagcaaactctagctccagatatactcacctggttaattctgccaagctctttaagaaggtagtatcactactagaaagcgcatgggagaccttggggctgacctcggtttgaaattattcaaccatttactatgagactgactttggtggtactttgatttttttcttctgtaaaacaggaataatatttcatagacttttgagaatcaaatactaatgcatgtaagttaatacagtatctgatagcaagtgttctatataaagtagccaattgctttactgagtatctgttttaatgtgtattacataagatattgtgttctcttgtagaaggtaaatggtttttcatcctatttgatagtttgtttttttttttcaaaagcatgtattttctaaatagtactgaaatttggagtaaaatcacttggcttgacatattgcctcatctttaatggttattccaggctatgcatttcttctctttcaagaagagagctcagttcaggcactcattgatgcttgtattgaagaagatggaaaactctatctgtgtgtttctagccctactatcaaggacaaaccagtaagtaaataccacatgaacttcaggctacaaatgcaaatttttcaaaaattgttttgaaatgattgttaattaataaaagaacaattaaactaccatgttgagttttagtttttgaaacatccagataatttatagcaggagtccccaacccctgggcagtggaccagtactggtggtccatgatcttttaggaaccaggccacacagcaggagatgagtggcaggcaagccagcattactgcctgagctctgcctcctgtcagatcagagatggcactctattctcataggaatgcgaaccctattgtgaactgcacgtgcgagtgatctaggttgcatgttctttatgagaatctaatgcctgatgatctgaggtggaacactttgatctcgaaaccatcctccaccacctccatccttagaaaaactgtcttcctcaaaattggtccctggtgccaaaaaggtcagagactgcggatttatagtatctagatcaacaaaagttataaaaataatttgtttccagatcccactatacaaatttttaagcaataaaagaatcactattaactggcaaaaacaaacaaacagaaaattctcataagacatcaagggagtaagacccaatgtaattttcttcataggttcaaatacgtccttggaatttaagtgatagtgattttgtaatggatggttctcagcctttggatccccgaaaaacaatttttgttggaggtgttcctaggccattaagggctggtaagtagaatgttaacaattttgtttaaaaaaatcatttaaatatgtcctagtcaatttaataaacgtttggaagctattgtgtacatgacactattggacagagcaggagcagattctgcatgcaccaattgctgctaactacagaattttgaaacaaattctgaggccccctcttgaaactctccaactggagaattgggtacttatctatcaatattagtgcagtagctaactcaaagcaaatctataagaatccacctaaatacttccgatttcctaagtgtacctctctgagataagagaatttggggtctgtttattttgtgtagatcgattctgatatctgaaaaagaaatatgggatttttttctcttttatctatattttaatcattaaagtagcactttagataagtgaatgatgataaacttctgtttatcaataactaggaaccaaaaacctaccaaaatatgtcacagaggaatataattgtagatgtatatgcccactttgcacttgttagatggtactgtgcaccatgtgtagagtgttagtgatttccatcactgagaacatcgtctccccagtcatagagatatatgttaaagaactattcatacatggaaatacttatagaatatgatgacttctacaaagaagtactatagggaacagaagagcatgtagcaaggaaatatgatatctgatatcttgaaggtatttgaagtctgatatcttgaaggtatttgtagttgagctgacatataaagactgggcaaaaggagtaggatcagggtggtagcagggttctgaggaatgtgtttcacagaaagggaacagcttatttaaaggtcttgagtggagggaaacagggtgctttgaaggaactgaaagaagcccaaagtgcctgacttgggatacaaggagtgagggaaggggtcaaatcatacaagtctaatagactaactcggtatttattctcagagcaagggtaaaccattgaagagtttttaagcaaaagagagacttcattatctttgcagttttcaaagttcactttagctaatgattcagagagaggggggccagggtgagagtaaatgcgggcagaccagtttaacatcctattattacaatccaggagatagacaatggtggcttggattagtggtagcagtggagaaagccaactgaacagaggtgacagatgtttatgaggtagacacaaagactgaatctcatctttcagtcataagccactgggtggatagtgatgccttttactgagatggaaggaaaactggagaaggagcagatagggagggaagattgtggtcttggttttgaacacaagtttatggcaccattcagagctcccaaatagaaatttcaattaaaccatggtatatggtatatttttttatgtatttttatggtggtatctggtgtattttttaagagaatcactctttatactgttttaaaaagctgggaaggcaagggccaaaagcaaagagagataaggttattgccatgaaccagatgaaaaatgatgttagcatgaatcaggatgttagtgatggaggtgaggcaattggactctagatatgttttaaaatcaagtttacaggattgcatgtgcagtatggagcaagggaagaatacagaaagaatgaagccaaagatcttgacaacttcatcttttctgttgctttctaactgggtcagcagaaactcattggagcaggtttaatgggataagggaagattatgagttccatttttaatataccgagtgtggccagtgcctgttaaatatcgagttgtccagtagacagttgcatgtacaagtctggcatccatgggagaggtccacactagagataaaaatgtaggagcttaaaaacatatagatggtgtttaaagctatgatacaggatgaaggtaccaaagccaggagtgtagatagtgttgcaaggattgaaagttagggtactctgacattgaaaagttaaggcgtttaggatgaactatcaaggaagactcagaagaaatgtatcagtgaggtaggagcagaattagtgggataatatattctagaagccagatggagaaaatatttgaatgagaaggaagggattaattgtgttcaatgctacttacagatagattgaccattggacttggcttgaacaattatagtggagtcatggtgtgatagtctggttagaaaaagagttgaataaagagaaagggaggagaggaattggggggaatactggaacagattttgagaaatttggttgtaaaggggaacagagaaatggagcagtagctgagagggagaaaaagtgttatgggaattttttttaagataggaaaattatagtgtacttgggaaaattgattgtatagaagggaaaggggagaattgctgaagcagtgtcctaagtgagagtgtatgggatctagtatgcaagtgaaaggattggatttaggaaagagcatggaactatttctctataggacagaagatagagtatatagtgggtttagtgctgtaagtaggtagatgtgatggtggtgagtcactttatagtttaaaaaaagcatcctcgatccccgtccttttttaacaacagcctcttatctgccattctactcctggtcaaatgataatatactattgacttttacgttttacaaaaagtacttaaaaattgttgattactgtgttctctcacatttgatgtaaacttcttttccttttcaagtggaacttgctatgatcatggaccggctgtatggtggagtttgttatgcaggaattgatacagatcctgagctaaaatacccaaaaggtgctgggcgagttgctttctccaatcagcagagctatattgctgccattagtgctcggtttgttcagcttcagcatggtgatattgataaacgtgtaagttgcatattgggaaatcacttatgtcctataataaggtgctgatccaaagcctcataccctaacgagttaataatataatttgaacactttaatttttatacttctgtaagtcttaaaggatattatataaaaatatccttgaaatggaaaattactgaacacactttaaactttagatataatgtaaaaatattaatatcattgtgcagccatgtcaaaattttttaatcagccagtaaggtcaaatattctaaccgtggaggcagaggttgttttaagagcctgtacattggagtcagactgcctgggattgaaccccatttctacaaattaaccttctgtatgcctctttttcctcacttgtaaaatagaaaacaatgataacatgtctttctcagtaattttgaggattaaatgaatttacatatatataagcacttagaatagaacttgacggagagtgttatttaaatgtttgttttcatttgtcacaaaatctaaaataaaaatgcattgtgtgtatttctctaaaataattgacctaaacttaaaatttttttagtagcattgcttgaatcatcacaataagaacttgtaagaagtactaggaatgataactgaaacccctactgaataattccaagtactgactaccttctaaaatagggaaagacactagcattcatttacaaatctattttatgccaaaatctgtgaacagttcctatacatagctaaatatattataaaataatcatgtttataattatagtatagcagaaatacattaagaatatgcgggtaaatgaattttttatatctgaattagtagatagaagatacaatttgagtgggtactccttttccccaatataacagtttcttcaagcctcttctggggctgtttggcacattaaaagactattttggggacagggaagctggttaattaataccgattgactagaccatgcatgctagaagtagtcctcaatgtaattacccaaccgtctcatttagaaaagaaatgcagcataggttcagttcacaaatgcagagtaggttttttttagtttgtttgcattgctacttaaaaggttgccaaaaaaaaaaaactaagaggaggtgctctgcttttgacaagacacgcatacgtaacttttctgaacttgtctgaacattaagagttcctgtagtgttgtgtttctcaacctctgctgtacattattcacctgggaacttagaaaaatcttgacatttgggtcctaccccctgaggttctgctgaattggttataaagctccggaagtgacacaaatgtacagcagtggtttagaccgctaacagagaggtgataggtcacagacgacgttatttacatagtatgtaatcatggtatttaatatacactaccagaagaaaaagactgttacagtgtcatacctcatacctctttgtttctgaaattatagtgaaggaccgattatttggagcagagtactgactcttaaagagcaactcagttgcagagcagatgaattgagatacatgtgccttcttaaaaaggcattgaaatacctgagggaaaagcttattttctaagatatgtgctacaaaggtaattttgaactgtatttgaaagaatttgagccttaaatattttacaagtcactaatattgcttatacaaagaaatattaaaccattaacctttatacctttcatctctccaatatgaatatggttattaaaccataaaaattgaataaatatacgtgtataactgccaacccagagatacacgggatacttatttggcgggaatgaaaattgtttattccacttaactttttagactcatggatactgtggtttagttcctatctgatagctggaaagcagtcaccacagatgtgtaattcattatatttttttgtatgttatttcataagtagtataattcactgtgacttctagtaaatgttagaaaataagactaggtgaagtgtagtgttaatgaaacttccttttgcatatagaagagtttaattattagagattattaatgaaaaataggttttgaaattcaattttccatctttaaagtctggttttgagtaaagtaggttagcttcataaaactaatatctagaattttaaaaatacaaataattgaaatcattgcatttgtgaaattttcattcaacagttttatattaaaatgtaactcctgaacatctggtgttttatcaggtattatggaagtgaagtaaacatcacagaccctggtttcaatctgtctaaaatcttattttaaaaaaaaagaaataaccatgagaaagaaacccagaaaacatatgtaaatgtattgcatttatgcatatatttatagcatttctacttcgtgctagatattcttctaggcactgggaactgaatgttgagcaaatgggtgctgtcccagtgttcatggagtttataattcagtgagatgaaatccagttaactctcatgctaccttaatttattctttgtttgtaataatgttcccataaaggaaaaagttgagagataaaaattaagcataacaattttaaaaatttgtgttaaagattgtaaagccactggaaaaaaggttaaaaactcttaactgacaaaagagaactcataaatcaatttaaaaaacaaacaaaactccagcaagaaaatatgcaaaagatacaaacaagcaattcagaaaagccaagtgtcgaatatacataaaatatatttatcctaatcctaatcaatgaaatataaacaacaatgtaattccattacctgtctatcaaatgaacatcctacagttcttgtaatcaacttttaggttgtttctagtttgttgttgttcttacaaataatattgcggaaaatatccttatattcattttctgcactcatgcaagtatttcagtagaatacattcagaatacaaactgttgggtcattactttttactataggcaacctttactttatgtcaatccagtccttcagaacactcagtgttctgttgtctcctaaggaacggctgagctgttatgctgtctggcacttttcagccaaacaacagtaaaaaccttccattcataaagttatcacaagcaggaaagcaaggctattgcagctaatagtagctaatactaatttatagaatattttaccatgtgccgagcactgtcttatgcttttacattcacaatttaagcctcacaactctgacaggatctgttattcccacttgacagatgtggaaactgaggtggagaagtttatcattcagagctgactccagtctgaagtgttctgccaagtcagaccttcacaacgggacttgtgctttatatcttataaatttacagaagtctaggcatgccctttgtaagattctccacagttctggcttgtctgtgccagttatttccaagcagagtgtgactcgcacctgcagtggagaggcgccgccttaatcagtggctgttcgggttctgccatctcacaggtgatactggaatgaggggaaaaggtgtggaaactgtcttccatgactacttgatatctcttttgtttttcactcataatctcccctaactctgaaaataccagcacacaggtgtttcaaagatgttattcaagaaaggtgagagtggaatgttttgcaaatcagatttttatagatttttaaagtgttttaacctactacattgtaaagctccttccttgagaaactgcccatttcctcagcttttaatgctggtcctttttttctgctgtagaacattttaagttattacagaatttgatttctgaagcagaccctaatgagacttaactttcttttttttcaaggtggaggtaaagccatatgtgctagatgaccagatgtgtgatgaatgccagggcgcacgctgtggtggaaaatttgctccctttttttgtgccaatgtcacttgcctgcagtattactgtgagttttgttgggcaaatatccactctcgtgctggacgtgagttccataagccattggtaaaggaaggtgctgatcgcccacgtcagatccacttccgctggaactaagaatagcaaactggcctctgtttaacaaggaaagaaagggtgcatgtggcttactgtgtctgaagatactgacatgcagaagaaataagtgcattcttctgcttttcaccccagctatcaatacatgcatctttatcagcagccaaaacactacaagcctcttgtttttcaccaaaaccctacatctcaggcttactaatttttgtgatattttcatgttcaaataaaatgtttttttgtattttctccaa

SEQ ID NO: 910 - DNA, 371 bp, Homo sapiens
cccggccaaaagtttaatttctttaaggataaatgtgctcttagaaacagggaagaaagaggctattaaacccgaaagggaaatggaaacagaacatgaataggaaattagggtttcacaaacactagtaattgtatgtgataacaaaagaaaattaattgaagacttaaaatattaagctatatttgtgaggttatgggaaatgtatcactcattcttacattttaggaaattttttagttatgattcagatatccacaaacttaattctaagtattgatcttcataagctttctatgtaatgaaataacgtaagacatagcaattggatgtaacctatgtggatttcagtgaaactaccaggcatgtat

SEQ ID NO: 911 - DNA, 361 bp, Homo sapiens
taaaaattagggttgatttttttgctctccattttgacttgcaagaaataatacctcaagataatctgatttattagctatttttaaacatttttaatcacaagctgtattagctttgctgctatataggtgttatgtgtaaatgccacctattaatacgggactgaaaacgttagagacacactgcattgcagataaaatgcaggcagcacaatatggcctaaactgccatagttttagaatgtgaaaaaaatgcatgtttacttacctgtatacaccatatgcatgcactagaattattaactaacgaggtgaggtattgcaaatgttcaaaaaagctctcttgaatctaggtagcatg

SEQ ID NO: 912 - DNA, 627 bp, Homo sapiens
taaatatgtattcagttgcatgctgcttgcgatgttattgcagggtgacatatggtactgactcaattagaatgaaactagcattagataacccttctgattacatgcatcctgaccggctcctcctcggcctcccctctgtgctctcgctctccagtgtctggaggccgcagattttcattatctctgccacatcggatgcaggatgggggtgggagagggaggggcctgtggatctctgggaaagaaagcggatcagacagacagacagactgctgtgaaagggttggtggggaagaatagagaggcctctgtgcttgcatttggaattaacatttacagttatattttttggaagtggttgtcaggcctactctgaaaaggggctggaaaggtctctctagagttgtgaagcaacggctgcatgtgattagtcagtccttaccttgaaatgatttatttaaaaagaatacattgttcgggcgcagtggctcatgtctgtaatcctagcatgggaggccgaagcagaagggttgcttgagcttagaagtttgagaccagcctgggcaacatagcaagactctgtctctaaaagaagaaaaaatttaagcttttcttaaaaaaaaa

SEQ ID NO: 913 - DNA, 623 bp, Homo sapiens
taaatatgtattcagttgcatgctgcttgcgatgttattgcagggtgacatatggttctgactcaattagaatgaaactagcattagataacccttctgattacatgcatcctgaccggctcctcctcggcctcccctctgtgctctcgctctccagtgtctggaggccgcagattttcattatctctgccacatcggatgcaggatgggggtgggagagggaggggcctgtggatctctgggaaagaaagcggatcagacagacagactgctgtgaaagggttggtggggaagaatagagaggcctctgtgcttgcatttggaattaacatttacaattatattttttggaagtggttgtcaggcctactctgaaaaggggctggaaaggtctctctagagttgtcaagcaacggctgcatgtgattagagagtccttaccttgaaatgatttatttaaaaagaatacattgttcgggcgcagtggctcatgtctgtaatcctagcatgggaggccgaagcagaagggttgcttgagcttagaagtttgagaccagcctgggcaacatagcaagactctgtctctaaaagaagaaaaaatttaagcttttcttaaaaaaaaa

SEQ ID NO: 914 - DNA, 268 bp, Homo sapiens
atcctccatagctatatccatttcctggaacatgggttggcccaagagggaatgagaaggacctgcgattgcacagaaaattctggcgcacatttaacgttaaatcattaagcttctgccaataaatccattactgttaattacactgagatggccaacgatctgctgacaatattccttcattgattttcattctcagtgaatcgatgttctggcttggctctcttgggtgttttcattctttcatttctttctccctgtcctcatc

SEQ ID NO: 915 - DNA, 268 bp, Homo sapiens
atcctccatagctatatccatttcctgggacatgggttggcccaagagggaatgagaaggacctgcgattgcacaggaaattctggggcacatttaacgttaaatcattaagcttctgccaataaatccattactgttaattacactgagatggccaacgatctgctgacaatattccttcattgattttcattctcagtgaatcgatgttctggcttggctgtctttggtgttttcattctttcatttctttctccctgtcctcatc

SEQ ID NO: 916 - DNA, 1368 bp, Homo sapiens
  SITE (24): n equals a,t,g, or c
  SITE (100): n equals a,t,g, or c
ctggatctctgtgcagtcagtttncctgcataatctatacaatgaaacaggctcagagagtgggtttacaacctttagcaagaaaagcttttaaaaatcnccatgcaggcagtctccaaggcacgtattgtcaacccctgcggctctgtgaagcaaacctgaaagacacgggtctgtcgatttcccggggctgtttctgtgctcaagtcaaaagattagttgggtgggctcagaatctacatcttcatggacaaagcaccagaatgatctgatgtctgtcattcaggctagggaagagccaagacttactcccaacccatgaggctgtgccaaagtcctaatattccctgagtcatacacaggctcatggagcccattcctagtcccacctcctcagaattcaggaccaacaaaatcctctttagcaaggagaaataatcctgctgatccacgaaatgccacaattagcaatttatccttttgctaaagcacttgcgagtccccataggaggaggcattcatcccacactcttccaggtaaacaaggtcatgagggccactcctccccatgagaagcagcagagcaattacatcctaggcacctgaggcaggcctactgactcaagaagatggcaagtctcatcttcactgcttcttcccctcagtctgtacatataaccatcctcatgcccttgtgcctgcttagcccccttaaccatgaagcactcagagacaagttacactgtgttcttgcttggcctgactggcccagccttttcttccagctttaggagcctcagaccttcagcctctacaggccatttagctcctctgtgctgacaggaacatgaaatccagagatgctgggaggtagaaggcagcctcctcttccccagagtgcagctgatggaggctggaggcagccgctggaggtagccagcagcatgcacaaaaagctttccccactcagtcctcttccatgccttcctgaagccactttaaatactgcacatctccttaatccacagggagactgaagatctctgggatttcaaaaggatgtacagcctttggagagaaagcaaagccctataagtgactatgattagaatcaactcgtgataaaacccaactggccagcctcaagggaggccctctgcaacctgccgcaccccacctgtccaggcccacggcctgtcactccctagcctatgtttcccatctgtcaataagtggccagttaggccagatagctttagagtctcacagacatgggttcaaattctaactttgcccctactagctgtctgactatggacaagtcacttagttttctttaaatgctcctatttttaaaaaaaaaaaaaa

SEQ ID NO: 917 - DNA, 8048 bp, Homo sapiens
tatctggaaaaactttgtttgctaagtagacatattaagcttatttttacttacaaagaactgtagcgtacagagaatatttaaaagacaggaagatgccagggaacatatattggatagtgttcaaataaatataacatttgaatagcctagagcaaggtaaacagaatatagaatcaatcgtgtccagactgttaacttattttgcttccaaagtttatttctcggaacaccataagatttgtataaagtatggtaggttgtttatcaaatcattttgtttgcaagaactcaccattagcagctgatatggccagatatacagatgtaatggcatcacaacaaccaaaaatagggctaatgagatggtgaccgtttctctctgctatgctcctgtctcagttcttgtagccttcaactcggtacgttaatatttgatgaagttggattctttcaaactagtgatgtctccataatggtaagtgttactattcacagaataattacaatacttctcatttcctcaactgatttttctagggattatggattcaaaaaacatacatttcctaagaaatactgggagggaattcccacatggaaacactggtctgtgtcctagccctagcctctgcagcatcattctgggatgacagtttgtaatagtgaccaaaacatgtaagttggagttaaggcagatcctagagatcagtgaactcctgcagatctgtggtgagtagtaaacaatatatatatatatatatattttagacagagtctcgctttgttgccaggctgtagtgcagtagcatgatcttggctcactgcaacctctgcctcctgggttcaagcaattctcctgcctcagcctcccaggtagctgggactagaggcatgcgccaccacacccagctaatttttgtacttttagtagagacggggtttcaccatgttggtcaggatggtctcaatcttttgacctaatgatccgcctgcctcggcctcccaaaatgctgggattacaggtgtgaaccaccgtgcctgggaaacaatacatttttaagtgccagaccaacttaccacatagatgttttaaaaactaacaacttcattgttggctacggcagcttctctggatctacagcctacaaagaactgactgaacctctgaatgaaagagtgagagcattaggtttagaatcagagttgggttcacatcctaactctgcaatgtactttatgtgttacatgttctttggtctcaggtttcatctgtaaaatgaggataacattgcattataaggattaaataatgttaagaacctaggacaatgcgtggcagaaacggccctctcccctcccatttcctataacagtcaaccttgacaccagggaagaggaaggccaccaagagctttctggtaacagaaaaccactcaatgaaggccacacacagaacactctcctttggaattcatctcactttaagaatattcaaggaaaaaagttgaattttgccaattcataaatcaaaagtgagtatgtactgtagagagagctttagttatttaaatacttaaaacatcaatttgccaaacaggtgcaagagattaaatagattcagacatgcccctatcctcaagtagcttacaagctaggaatacaaagctgactgtgatgcacaaagatgacaggaataccacgaaagaagagattcctgccaaccacggaagccaggccatacaaaggagcaacaacatttcacaggcattcatgcagaagggcattccaggcagaggggatggcatgaacatagcaataacatcacacagtatagtgcagccatccatttcccagcgtgggagaggagatggaggggatgatgacggaaaaggtgagctgaagcaaggttataaaaaccagagctagaaattggactttatcctggaagcaatacaggcagtccatcttgggtccccagtacattttaggtagggtttactttacacagatttgcatatatatcagaacatgatctgttgtaaaaagcagggacatcaccattatcattctctttgttcttctgagtcagtccctcaaaatctccattggaatcctctggaattttccgaaggccccagcctaaagtccctacaagatctttgcaaaggactctcagagatcctcttccatttggtatttgggagcacaaagatccaagtagtacagtagttatcagcactacagcctgcactacccactttctggatctctgtgcagttcagttccctgaataatctataaaatgaaaacaggctcagaggagtggtttacaaacctttaacaaagaaagctttttaaaaatccccatgcaggcagtctccaaggcacctattgtcaacccctggggctctgtgaagcaaacctgaaagacacgggtctgtccgattcccggggctgtttctgtgctcaagtgaaaagattagttgggtgggctcagaatctacatcttcatggacaaagcaccagaatgatctgatgtctgtcattcaggctagggaagagccaagacttactcccaacccatgaggctgtgccaaagtcctaatattccctgagtcatacacaggctcatggagcccattcctagtcccacctcctcagaattcaggaccaacaaaatcctctttagcaaggagaaataatcctgctgatccacgaaatgccacaattagcaatttatccttttgctaaagcacttgcgagtccccataggaggaggcattcatcccacactcttccaggtaaacaaggtcatgagggccactcctccccatgagaagcagcagagcaattacatcctaggcacctgaggcaggcctactgactcaagaagatggcaagtctcatcttcactgcttcttcccctcagtctgtacatataaccatcctcatgcccttgtgcctgcttagcccccttaaccatgaagcactcagagacaagttacactgtgttcttgcttggcctgactggcccagccttttcttccagctttaggagcctcagaccttcagcctctacaggccatttagctcctctgtgctgacaggaacatgaaatccagagatgctgggaggtagaaggcagcctcctcttccccagagtgcagctgatggaggctggaggcagccgctggaggtagccagcagcatgcacaaaaagctttccccactcagtcctcttccatgccttcctgaagccactttaaatactgcacatctccttaatccacagggagactgaagatctctgggatttcaaaaggatgtacagcctttggagagaaagcaaagccctataagtgactatgattagaatcaactcgtgataaaacccaactggccagcctcaagggaggccctctgcaacctgccgcaccccacctgtccaggcccacggcctgtcactccctagcctatgtttcccatctgtcaataagtggccagttaggccagatagctttagagtctcacagacatgggttcaaattctaactttgcccctactagctgtctgactatggacaagtcacttagttttctttaaatgctcctatttttaaaaaaaaaaaaaaggccctacatgactggactgctgaggattaattaacacaaggtatacaaagcacttacccagtataccagctggcactgtatgcattcattacatgtgagctactctttttattattatcctatacacatcacttcccaaaacaatcccccctcccccagtatctctgtattcttttgcccacctagattccacctgctcctgctgatcaatcaaaagcctattcttgcttaaaaaaaaaaaaacttctctgtccctcaaggtccaattcaaccactgacctttcccaagggatcttccctgacaaacaaggtctacaggaatctatcttcctctcctgtgtctttcgcctggcccttgtcacacagtgcaagttctcttcactttctagactgaaggaacatgaggacttgggcctcagtgtcccatctgtcaaatgaggattataatcctctgcctcctttctgctgaatgaggtgttttaaagttcccgtaacatgcttaataaatcacagcatatgtatacattcacatgttgcttcaaatgtatgcttaaatattctgtacgttgggtgcctgaggataatgaattttgttaacttatgtgtttttataagcagacatacagaattcaaagacatttttaacacattaggaataagagctgagactgataaagcatttcatgtacaggtttcacatattaatttccatatgcataacaacccattagtataatcccaattttacagaaggggcaactgaggcacataaaatattcatattttccaagcactatggaacagtggcaggtggggagccaggtttcaaggtaggaggtccaactctcttaaccctgaagctgtccctcaccagttaaattttaatttctccacagtactggctctaccaatggttccttactctctcacctctgctgaggtggtatcatgagggcctcctctagagctagtttgagacccaggggaacggtgtattcacagaatcttagttccctaaggagtaaagaaaaggtttcatcatccatataggtggtttgcatctctggccctacgttagagtcaacctcagaaggttcaggtgaccacgttagagtcatctaaaaagaaaggtgctttttagtaccactatacttgatccccgccctggccaaattaagtcgaaatctgtgaggtggggcctaaattggtagtttgaaaaatgtttccaagtgatgctaatacatagcagccagcggtgagaaacactggtttagaccagtgcttctcaagatttaatgtgcacagaaatcccctgggggtcttgttaaactataatttgattcggtaggtctggggtgagcaggagattctacagttcttgaaagctcccaggtgatgccaattccaaaaattccacttctgaatgataaaggtttatactagaggttctcaaagtgaaggtccactgacccatggggatctccaggactctagggggtccatggggtcaaaactactttcataacaatattattttattatttatccttttactatgttgacatttgcactaatggttaaaaaaaaaaaaaagaaaagaaaagaaaaaacaaacaacaggctgggtgtggtggctcatgcctatatcccagcactgtaggagggcgaggcaggtggatcacttgagtccaggagttgaagaccagcctggccaacatagcaaaactctgtctctaccaaaaaataaagacaaaaaaaataataagccgggcatggtggcgggcacctgtaatcccaactacttgggaggctgaaacaggagaatcgctttaacccgggacacagaggctgtagtgagctgagatcatgccgctgcattccagcctggacaacagagtgagactccgtctcaaaaaaaaaagaaaaaaaaaaagactccctacactcacatcctcactaacaggatgttagtggcttctatttttccctcccaaaagtacctggagaagggaacaaaaccaaattatgatgctcctaagaggagctcagtgaagtgtcaaacctggcccacctaagtgacctactgaggagaaaactttaaaatctttccaagcctatataaacaagtctagagttgaccaaggcctcacatgtcatctggtccaacgattccaatgcatgcatctggcatttgcctgaacattcctggaggtgggaggttcatcatctcttgatgaagtccatctaacttaaaggttttcacaagatgctttttcttatagtgtgccaacatctgccacctagctttttccccaactggcctcatcaagaaccaccccaggacagccctgcagaaactcctatgtcttctctgcttgagctcttccagtgctcatcctacacactagtgctattttgatcactgactttccaaggagagtgcccataaatgaataactaaaaacacggaagactgcagggaagaagtaagccttatagttatggaaacttttagatgctgaaaacaaagtcagaaatgatgatcagaagacagtataagaacaccatcaggggaaaggaaagacatttaccctgagaagatcaacaagggcaaatctaagatgaccaaggccactggcccttcctgtgtcacaggactgtggcaaaataatacatcacgagaaaggatgggcatataaaggaaatagtaggatgaaattctattcaatttcccaacactggttcccagactggctaaatgtgacttatctatacaagtctttaaaaattcagagacctgggccccatcctcagggcgactaattgaatagattgaggctggagttcagggatagaccgcatggccaaatttgggaactatgactacagatggtgtgagccactgaggaaataacatcactggggagaaaaaggtagctttcattatatagcttatatgaccttgagaatgtatattatgtctctctcttttgagggtgtaagggagagagggaaggaaatgagaaacatgatcatcagggaaaggaagacgtacgacaaatcctgcacagctagtgccaggatgctaaagtattgtgatgagggaaatggtgcagaccaggcttctaaagtgaagttgttaatgaaatgaaaggtagacaatacgcagaagcagcctgtcatatatgctaaactgtctgttttctggagaatccaaaagcattggaaactgttttctctgatatccctagttggtttactcaaggataaaatgcccagacttccttcctaacagcaggctaattgatttaaccaaagaatgtgcaaacaagatatactgttcctaaattatgcagtttttccttccttctctatacagtctatttttgcttttgttggacaacatcccactgatcgatcgatctctgaataaaaacactgaaatggactgttgattatctaaatgcctttgagttattctgacaattcctttaattcagtgttctttacaccagccaggacctgaccctagcactccccacactccccccactccccctccaatggcaacagcaaaactcacagtgaagatgccttgagtaggatgttcacagaggcagccagctccttatccagcatggccctgaagcaaaggcacagggtggcagttactggagcaagtcctggggtctcaagaaaggggaaggggatggggttccagggacttacccaggaaacctgactctaagtagacaggcttttagcattccctccccttacatcctccctgctcaaaccagcacattccataactatcaggcacaaaacctctgaagataagctgtttgtaagtccttctctgggtgaggagagaagcagggaagcacctatgggaaggcagtttgaataacaggcccagtctgcttagagaatgggagttaacactgaaccaaaaataagaagacctaggttccattccccgtcctgcagtaacatggctgtgtgatcttaagttccttctttcattctagtaagaagtattcaagcacctactctgagataggccctttcccacctctcaacttgaatctcctattggtacaagaggattggtttagctggtggtttccaacctttttcactaccgagaacttcttttattatgccaccttctgctgttaactctcagagatgcatctggttgatgggtgctttgatttgtagatacccatgtgaccgcacagagctgatacaactccaaagcaaaagcaaaaaaagaatcatatcctgtgttcattttggcaaatacaagctcttttcacttgttattaaaggtttctaccacagccctaacagcatagtcatctcctttacagacctctaagattttttgactgactccaggctgaaat

SEQ ID NO: 918 - DNA, 298 bp, Homo sapiens
tgcttaaaaaaaaaaaaacttctctgtccctcaaggtccaattcaaccactgacctttcccaagggatcttccctgacaaacaaggtctacaggaatctatcttcctctcctgtgtctttcgcctggcccttgtcacacagtgcaagttctcttcactttctagactgaaggaacatgaggacttgggcctcagtgtcccatctgtcaaatgaggattataatcctctgcctcctttctgctgaatgaggtgttttaaagttcccgtaacatgcttaataaatcacagcatatgtata

SEQ ID NO: 919 - DNA, 532 bp, Homo sapiens
tttacagatggggtctcattttctggcccaggctggtcccaaactcctggcctcaagtgatccccctaactcagcgtcccaaagtgctgggattacaagtatgagccactgcgcctggcccagatcacctttaatattatactggatttcaatctcagtctgattgctgtgcatagaattggtgaacacaataaattgtgtctgaactagtacacgtgtcatagaaataggagcaccatcagtgcaaggaagaagtgttcccaaccatccaaactgcaagccctcagagtgtagcaggccctgacaaatcttcctcagatctctgacagccaaaggtctccattccatgaagtgcttggaccctgccaaacaaaccttatctgagccctgctccctgctctctccttccctcagctgctgccaagagaattgacctactctgtcttccctcaggttgaacactgctgaatttaagggctccatactaatgtgacattaccgccaccatcatcgttcctttggaaagttccaa

SEQ ID NO: 920 - DNA, 2620 bp, Homo sapiens
gaaagaggaagctggcagccaaggcatacatgcccctgcgggcaaagcggtgggcagctgagctggatggacgctgcccctcggacagcagtgcagagggggcttcagtccccgagcggccagacgaaggcattgacagccacacatttgagagcatcagtgaagatgactcatccctgtcccacctcaagtcatctatcaccaactactttggtgcagctgggcggttggcctgtggggagaagtaccaggtgttggctcggagggtcacacctgagggcaaggttcagtacctggtggagtgggaagggaccaccccttactgactagcccccgggggtgccaggggtcctgaaaaccaaaggaggagcagcagaagccataggctccccagctttctccaggctggggtgggagaaggaagcaggacagagctgcaagtgcctggcagaatgccctgcctgcctgcctgccaggccaaggcctgcgtctctctgctgtaccagctctgttccagggcctcctcaggctcgttacccctgtgcctgtgtctctacacactccacaccccctcaaactctgtttatctgttctctgaccttgtgtcccctgcgctgggacccttcctcctgaggcccaggtctttgtccccagttgtgtgccttgacctctctcgcccctttctgggtgtgttcgcacatcctgtgtgtgcacagctgtccctccactggatccccttcacacgtgacccgtggggcagccagtcctcccagggactacataacaggcacctttgagagagcatgggagaaggtggataagaggatgctgctcagtgcttttctcttccactttcctgccactccccactaccctcggagagaggtggtgggatgggagagagcccctgtgaaagcctgtgaggatctgaagagtaaagggctgggtctgcctcagaaggcaccagcaccagggcccaggtattaaggctgagagtgaaggctgccaatgtcagctttggaggtcccagaagtcttctgttctctggcctcaccccctcagtcgccatagagctgggcctggccttgctggaatggaggcatccttccaaacctgggggacgggggtggggggtggtagtggtgggagggaaaaccatgtcttgctaaacctgtttctggtgcctcccatccccagacccaccagacaccacacagcagacaatacacacccactcgcacaagcttccatccacatgtgttgtactttcagctctaggcatgcagacaaccccacacggccacaccaccacatgcccaagtgtacacacacagagccacaccgtccctctgggcctgctggctcctcccttggctttcccttggcccacttccagggcccaggtgctgcaactaaatgtgaaagctcagtggccgctccttctttcagcccatcaaccagcattggtcccatagggaagcacaggggactcaccctctttcatatcccttgccctgccctgaaatggacaatcactttttgggataggttgaaatttttaaagagcctgcatcatttggttccctcaaagggaagcccttgccagtgggggtttgaaagagaatttttggaaccaacattcaaattctgcctcatctggagggaaaccaaaattgggagggggaagaggacccctgatgttttgctgcttccagagatattagaaactgactcacttgattggaaaatggacaaaagtgccttgacgtggagggtgggcaccagatggggaccagccttgccaactgctgctgtggcctccagcttggctggttttgcaggccgccagcaggaaggcgaaggtggtagtacagcaagaggcactggcggggcagcaggcctgcaggagctgtttttccattgctaggcctgacccctctctacctgtgagcgttcagggggtccctgagatagtttagatgcccccccatcttagacctcagctcccacagtgccttttaagggggacctcacctcctgtgcacagcccacccactttcctctgcttccctggcacagcccaggcatagacgagctggcgttggacccagttcttcccccttttcagccccacagctgctgccacaggggccaactagggccaggtggaaggggagctgagaagccaacccctagcccaggggtgctgtgggaactgggatccaatttgtagcttcctgcctggcttcagagagcccagcaaccttctaggcctgctttccagacttctgagatagcctgggatgagcaatcctgttatagtacatctggaccttccctacctgggctctggggaggctgtgggcctggagagggaaaaggagggagggggtgtctgcaccacctgggaagatagcacaaggcctaatgaggtcaccctgactccccaccccagcatttcattcataccagataatagctgcattactgccaactgaccttataaccctctgcaccttcaaaaagattcatggtttttaattgctgcttttaataacatttgttaaagttataattaatgtgtctgatttatgatttaaaacctccctttgaacaatca

SEQ ID NO: 921 - DNA, 548 bp, Homo sapiens
cgcctctcagagtactgggattataggtgcgagccactgtgcctggtccccaaagtaatttttttattgtccggcttctcatctgtttcccagagttttcccattcactaggtcatttaattcttaaacaaatctaggtaaggtggatagtgacaaatcaactgtggtgagtacttgtatcacgacatactaagtttagtttcctgatattcaaagtagaaatattccacctacctctcaagactgctgcacgaattggttgactcagttcttaagccatggaacttgctctactgtgagagcactgtggaaagagcaactgaccctgagtagtaggattggaggagggaaggaggtcagcaacagggaactcatagtggaaagcaagacttgtaagggcagagtgagaatgtgggaggacattccaggaagaagaaactggatagtcgagagcccagagttgagacacactgggaaagtagggaattacagattccttagtcgacctccagaattagaaatcaagtctatgtaagcttacttgaaaa

SEQ ID NO: 922 - DNA, 226 bp, Homo sapiens
tgagtccaaagtaatttttttgtttttgagacagggtctcgctctatggcccaggctggagcgcagcggtgtgatcatggctcgctgcagcctccagctcttgggctcaagcaatcctcccatctcagcctcctaagtagctgggactacaggtacatgccactgtgtctagctaattttttttttttggcagagacaaggttttgccatgttgccaaggctgatc

SEQ ID NO: 923 - DNA, 1122 bp, Homo sapiens
tcgccgtgttggccaggctgatcttgaactcccaacctcaagtgatctgctcgctcgccttggcctcccaaagtcctgggatacaggcgtgagccaccacactaggcctttccctttggtttatacttagatgtagtcaccttagtagaggggtgtccccggaatagaattttccatccccggccttctgtctttctcattgctgacaataagtaggaagcaagctaacaagcagcaggctacggctgcctacaagtgtacataggtatctgcctgtccccctaactgggcatcagctccaggccagcagggctttcccctctctttcagtcactgccgtgtcctcgcctaagagagtgtctggcacacagtaggtgctcagtgagttactcattgattaaaaagcctggaaaaccaggctgtgtcgtgaagataataggcagccactgaggtcttactgcatgagaacaaggaaagctcagctcagtgtagattgccggacctaaattttgtggaatcgcctttcatacctaagaggcgagcaccgttgccagctttgcacttggagccccctctgtcatttattttgttgacttaaaagctgttttgtgaacccagcataatggcacttcttaaacttgtagaaaaagggtgtttcttacctgtttatttcaacacatctcgttgcctcacctggagaggcaactctcctctgtagagtgaaagactataatggtggccatgtagaaactaatattccagaaggagagagctccaagaaggggattccagtgaaccatatgtacactgtgtttgagagacattagttccccacggagaagggatggatagtctgtgcttcgggggtctaaggaaggcttcctgcaggtgctggtacctccttaggtctggggtggttccttctaagtttccttaccctgcctgcatcacctctgcctcttatgacctctgtgcaaagactgggaagggtcacccccaatggctgtgaacgaacctgtttgtgattctaaacagggcacgggaccatcctacaataaaaattacccagcctaaaatgccagtagtgccagtagtccctgtttagaaaaagaaaaaaaaaaa

SEQ ID NO: 924 - DNA, 309 bp, Homo sapiens
gaaaaccaaacaggtctccttgctttcacccttgttgccctgggggtctgttcacaacactcgctggagtggctgaaacacaagacaggcctctagtggcttcccacctcggtgaaagccagagtccttaccgtggcctcggctccagcgttcttgcctccttgctgcttcttgaacatgccacacatctgtcttggtacctgctagttattgcctttgcctggacattttctcagatagctgcaagtcttgctccctgtcttctctttggtttttcttttttaatttgaggtggaggcttactgtcgc

SEQ ID NO: 925 - DNA, 478 bp, Homo sapiens
gcaagttaaatagacaagggagttaatccagtctttgcctatgtatgaccgtgggtaagttaatcttactatacttcagcttcatcatttataaaatgagaaattaatagtactaatcacagagattgataaaagaattaattgacgtgagatatttagcacgctgcctggagtttagaaagcatccaataaatgttatcttttccatgagttaggattttttttattataatagaaaacccaattcaaacttgcctacagagtaaaaagaaatgacttttgtcacagctgaaaagtctagcagtagaatgaactttaggtattgtttgatcagggtaccatgctttcagacctggtcttgctgatgtgttggctttatcttcagctggtttcttccctcacaatagcagataatcacagcagtttcaggccttatatccacacatccagaaagaaagaatttctcattcctccaact

SEQ ID NO: 926 - DNA, 483 bp, Homo sapiens
gcaagttaaatagacaagggagttaatccagtctttgcctatgtatgaccgtgggtaagttaatcttactatacttcagcttcatcatttataaaatgagaaattaatagtactaatcacagagattgataaaagaattaattgacgtgagatatttagcacgctgcctggagtttagaaagcatccaataaatgttatcttttccatgagttaggattttttttattataatagaaaacccaattcaaacttgcctacagagtaaaaagaaatgacttttgtcacagctgaaaagtctagcagtagaatgaactttaggtattgtttgatcagggtaccatgctttcagacctggtcttgctgatgtgttggctttatcttcagctggtttcttccctcacaatagcagataatcacagcagtttcaggccttatatccacacatccagaaagaaagaatttctcatatcctccaactatca

SEQ ID NO: 927 - DNA, 483 bp, Homo sapiens; identical to SEQ ID NO: 926

SEQ ID NO: 928 - DNA, 345 bp, Homo sapiens
tataatcccagctactcagaaggctgaggcaggaagatcccttgagcccaggagtttgaggccagcccgggcaacatagtgagacccatctcttaaaaaaataaaaaataaaaaaaaaataagtccccactccttatttttaactttaatcaattgtacatttcaaaataactagaagagaataatttgaatgtttctagcacgaagaaaagataacggttgggcaccatggctcatgcctgtaatcccaacattttgggaggctgaagtgagaggatcacttgagcccaggagttcaagaccagtctgagcaacatagtgagaccccatctctacaaaaaattt

SEQ ID NO: 929 - DNA, 471 bp, Homo sapiens
gtgttacatgtatttagcacattatggagaaaatagagtgataacttgagttctagtgagctccaaagggatggaatgatatgtaaaaatcaccagaaatttgtttaagccatactgaacctttctataatgagacctaaatagaataaggtactgggtaatgaatgtttcccaaattatggcatgaatgtttaaggactatttcattttaagagatgcagtgtccagaaattgtcaccatggtagtagtttttaaaatgtgttcctcagagctgattggctccaggagtgtgtaactcaggagtgtcatctaccatctgtttatctatctagttaactatctattgtagagacggttgtggtggagtaaaccaaacaggcagcttgggattcatttgttggggatctgcacaagatattgttagaaaatagtttgggctgctaaaaaaaaaaaaaaaaaagaaaaaaaaa

SEQ ID NO: 930 - DNA, 841 bp, Homo sapiens
acaaacatgttttccttctatgtaggcaaaatcaaattaaatttacagtgggatgtttgcttaagaaaaaaaaaacctgacccttacatataaatacaatgattgtcattttttttaataagcatttcagagggttctgttgtgtcaggtgctttttaaaaacagctgttgttgagtctaaatgacgtgcctgctactggctgaacagagaccatccgggtgaccatttctcctcaccaaagccatttattctcagagagtgactctgtacccacctgaacctctttgcaaactctcccctactttgcctcagccttagcaggtgcactcttaaccctttctccttcctcccttttcagcctcctgattaacgttctttattttgttttcccttggaacgatggcactttccctgctcctgtgttaatttctgttcttcttttctgtttccaccgtgccctgcccctgactccttgctgcacagagcttttgtctcctggtgtgcagaggttgtcgtacctgcgcaccagcagcctcagccccacccacagcgactcccgccccaacccccctttccgacaccacttcattccccatatcaaaggtaaggaggcaggtttctccaggcagcaccctgcatagtggagatttattagcaccctgggaaggctaataaggtgtatctccaagagttagtgccgagcttttgagctctcagcatgcctgcgtgtgtcatgactatacccaacagttgtcttagaacgggcatagcatctctcattgggagaaatatgtcacttctaagggctctagatgaagaagcaggaagtatgtttaagac

SEQ ID NO: 931 - DNA, 825 bp, Homo sapiens
tccggtggtgacagccggatgctcctgttgccttgcgtcatcagcaggtaatctggggaggttcactggtaccttgtgaatattctgtttcctgtcagcctttcacctaatggtcttagcatccctaaatcattatttcatcagggatgtcaaagatgatttccatattctgtgattcttttcacatgtattagcgggcattctgtaaagaaacttcttatcatcaataagagaacatcatagattcttctaaaaaagcagggtcaatgtttcattctgtcctttatccatttgaaaggaagatagtcacctatagttgtggaaatcagtgttttcctttcactcctctgcttctttccctccatccttcctttgtgaatcactgtgtgccaactgactattcattgtgttgtagtcacagtcatggggttttctgctgctcacttgatttcagatatggccagtggaaactcctgctggctggttcctgtgtccttttcatatgtgtgtattaatgtttaagagccaaaatccaggctgggtgcagtggctcacatctgtaatcccagcacttcgggaggctgaagtgggtgaatctcttgagcctaggagttcaagaccaatttggcaactgtggtgaaaccccatctctacaagaaataccaaaaaataaaaaagagaaattagccaggtggggtggcacacacttgtggtcctactcaggaggctgaggtgggaggattgcttgagcctgggaggcagaggttgtagtgagcagagatcataccattgctttcaagcttgagtaacagagcaagacttttg

SEQ ID NO: 932 - DNA, 278 bp, Homo sapiens
tggagtgctatttcttactcatatttaacgttacagagttttctcttctttggtttaatatttgtagctcgtttctcttaatgctagaaatcttggttcttaacaacagtatatttatttgttaaaacagtttcatagtatcaaaattatcactactaggggagcagagggctcacacctgtaattccagtgcatcgggaagctgaggcaggaggatcgctccacgtcaggagtttgagagaagcctgggcaacgcagtgagaccttatctctacaaa

SEQ ID NO: 933 - DNA, 543 bp, Homo sapiens
aaggctgcctcatgctcttcgtgacttactgcttgctataatcctgagtctgtggatgatcacatcagaaaacgccctcagtttactgttgcgtcccactgcttcccatcttctgaattaagactgcacattctggctctttgccttgggtaatcttttcccccaataacttgggagctttgattccaagtggcttaggagagttgttctccacacagctgggtaccagaagcagccagctgaatgggaccaaggcatgaagactgaaaacctcgcaggtgacttggatcttcatcccaggttgagaatctctagcttaggagtctcttttgagtcctaaaggaaatactcaatttcccccatctgtcaggtccctgccacatctaccgacatgtgcaatgggattaattcttaagaaattcatatacagcttagactgttgctcagagactcctgccactctgtgaaccacccctatggacactgatgcacaatttcctttgggttgatctcataagttgcatttccaaaaaaaaaaaagaa

SEQ ID NO: 934 - DNA, 543 bp, Homo sapiens; identical to SEQ ID NO: 933

SEQ ID NO: 935 - DNA, 543 bp, Homo sapiens; identical to SEQ ID NO: 933

SEQ ID NO: 936 - DNA, 224 bp, Homo sapiens
catctctcacatttatgttagaacaaggccatgaatgctgttttcttctatctcatgatccctaccatttcttcttctgtttctcacctcaataaaatggctcccatgttgatgccttgattcccggaaggagctactgttttgctttgcctcttaacatcgctcaggtgatgctgcccttgctgatactctgtctctgagctgaagcaggagaaaatcccctc

SEQ ID NO: 937 - DNA, 224 bp, Homo sapiens; identical to SEQ ID NO: 936

SEQ ID NO: 938 - DNA, 224 bp, Homo sapiens; identical to SEQ ID NO: 936

SEQ ID NO: 939 - DNA, 2265 bp, Homo sapiens
caaagtcggaagttacttccttggggaccgagagcccacaggggtcttcctactgcttcttctacccctgtatttcactcagctctctaaatttgtctcagctccaggtaagatcaaatcctttacccgtgatctggaacttcaggttccccagtgagagtgtgtgtttgggggcagacaatccccctttcacacattgggcactcacagttttttggctgtctccaggcgccctgcaggagcaatctgcttccttcaaagagtctgtgggttatctcagctttcctgttcttcttgatttttgaatgtgtaagggtaactctagaatttttctcatctttgaatagaggacatgaaattttctctccatggtctagggagagttatggctccaggaaagaagagaaaatgtattatatttcccacttctcttctatctttgcaggaaggcagggatttcaacctgggcaacaagtccacagaacatgagatttctgaaggtgagtcacatagaacattgactgggttgaactcaggtctggacaacaattaagtactgtaaatctcttggaggatataggcttatttcttaagttattattacatataaatgataatatatgtaaaaaatatataaataatgataatatatatatttatatgtaaatgataaaataaaatatatattttataaaataaaagatatatctttgataaaataaaataaatgtaaatgataaaatatatttttcaacctaaaattgcaatatatatagttgacccttgagcaacacaggtttgaacttcataggtccacttataagtggattctttttccataaacgcattgaaaaattttttggagattttgacaattaaaaaaaacaaacaaactgcaaagcatagcaatatagaaaaaatcaagaaaaagtatgtcataaatgcataaaatatatgtagacagtagtctattttatcacttactaccataatatacactaatctatcattaaaagttaacatttatcaaaacttacatacccaaacacagactgtatatggtgccatttgtacttgagagaaatgtaaacaaataaaaagatgtagtgttaaatcataacttcataaaattaactgtagtgcatactatactactgtaatagttttatagccacctcttgttgctattgtggtgagctcaagtgttacaagtatccacttaaaatgccacctaatgctaatcatctctttgtaagcagtttgtctctccagtaaattgtgtatcacagtaaaaagctgtctctcaagtttcttgtttatttttcatcatgtttagtacaatataatacaccttgaataacaccatgggactcacatgaagtgtgactagtgatgctggaagtgcttccaagaagcagagaaaagttatgacattacaagcaaaagctcagttgcttgataagtcccatagcttgaggatgtcaggtgcagttgcccaccatttcagataggcaattcatcttgtaaacagacgacataaacttacagtattgataaatacaatccactactgcaaatttattttcacatccttatgattttcttaataatgttttgtttttcctatcttactttattgtaaaaatacagtaggtagtatatataacatacaaaatatatgttaatcaactgtttatattatcggtaagccttccagtcaacagtaatctattagtagttaagttttgggggagtcaaaattatatacacatttttgactgcacagggggtcagtgaccctaacctctatgttgttcaagagccaactgtatatttctttctgttatctctctatagtgaaatgcctttcagtggagaaaataaataagtatgtatatacactgggaaacttatctatacacatagagagaagtgttttactaatgagatattcaatactacccaagttaactctcgtatactacttcttgtaatttttccttgctttttctacttccaggtgtgtgggatacatcatggttacataaaaatcctttcactatagttcctgcttccctatcttcaaaatgattccctgaagacttccgccatgacggtctaaagcctaacctctgaactgtggatggaaaattgaactccttgatgtgatctctgcacatcatgcaaccctaaacctaaatatattctctgtgtgggagccccattatttttagtctaatacattttaagtcatcttaaaaaatt

SEQ ID NO: 940 - DNA, 376 bp, Homo sapiens
gttccctgggatatgtttgatgagtttttgtggcagagaagcagagaaaggagaaaggtgatgtctatactacttcctttttctccccagccacaaatgccagagtctataaagagaccctgagaagcaagctctgtgcagagtcacttctaagaaataccaggataaaatgtaggtgagagacatttgtgtgaaaaaagggatgagagagaggaggaaggattgagaaaattttcaaggcagaaagggacctatatcttctaatttggcaaaatgggagaggtaggtaggagatgggaatgctctcttatctatctcgccttttggatggagattaataacacaacccaggagaaagtgatccttaggaagccca

SEQ ID NO: 941 - DNA, 7626 bp, Homo sapiens
gcacttggcttcaaagctggctcttggaaattgagcggagagcgacgcggttgttgtagctgccgctgcggccgccgcggaataataagccgggtacagtggctggggtcagggtcgtgtctaggggacggccgagggcctcggagggcgagtattgaggaacggggtcctctaagaaggccggactggaggtcagggatctgcgcggggcccggctgggcctcggggggcggtgggcagggccttcgcctgggtctggccgtgtgagccacactgggctggctttagagggaggctatgggagcccagcctggcggggttaggcggcgtgggggtgggggttcggggctgcagtcatgagtcgaggtcggctgttctcaggaactgcctgaagaggctttcgggtcttgattgaagcaaaatccgctcccccacgctgagcgcctgcggagtagcaggctctttcctgggcccggcccctgcgcgccctgccatcccgcctcgggggtgggaaagtgggaccgcacctgggccaggtacaggcgcgggtccctagagccaggccgccctgagaaaccgatcctggaactcgtgggccttcttgggcttgctctgcccacggccccggcccacctggagctgttaagaacagtcagcccaggcacttaactcatgagcagtgtagtgcagtttttttcatttaaaaagatacatctctgcttctttctggattgatttttctttgaagatgaatgtgagaaatagaacttaaaggtctattctgagtgtgctttataaatgattttatcatcagtgatgggtgttagaaaaatctaggtaattatgcctggagttctgacgtttcattggcaaacttcagaggaagtcttgaacttctggttgtcagcttttttttttaacccattcattgtgattcaagtataccgtttttctgcttagtccttgacattgtttaggttataattagaattttatctgtggaattgcacttttcattcttttgttttacggtgcttaagtgatatttcctactcttggaaaaagtaccttgaaagtcttgagcatgtttgtctgtgacctcagcaagcagaggaaaaagattaaaattgtcacgtgggcaactgtaaacacttaaaatgtttttgtcgttttaaacaaaattttcctaatgaacagtctgaacacattttagttctgtcctcataactttaaaaaataatgttttgaataaaattaggagtatcataaagcggtataaatttgttgaaatatttgggtataactttggcacacgcaggtactactttaaagtgtcacaaaaagggaacataattctggtttttgtttggaaagaatagacaagttgatacctgaatttgagggttgttttgattggaagaagctaaatactacactagtatagaatatacacgtttccaatgtctcaggagtcaagaaggatggaaagttattgtaggagtccttacccttgtaaatattgtttgaatgtaattaatatttatggaatagttatgctgcagtaggcactgtggaaaatgctttacatatagtgtttcattaatgcttaaaactactcgagttagtggcatgtaattaagtcagtttttccttcactttaggatctaccatacccattgactaactatggaagattataccaaaatagagaaaattggagaaggtgagtggttttagtaaaataaattttatggaatgatttaacaatgctacaacttctgtaatatgaacacatttaaatatttattaaaattcaaccattaagatgtcttgtagtaccagtgtgcattaacatatgttctttacttaataaacgcaaatttgctcacatttcaagagaattgaaattaccgaatccctaatgacccttcgcctcacccccatagtcttacagtcttctgatactaaacacttatagtagtacttgtattttgaagacactattgataacttgcatgtgtgttgaggggcagaggttagggctgcagaattatgctaacttcataatatatttttagttttagtctctttcaattgtttttaggatgataaatatttttatccagactttatagactggttacaataattgacttaatctaatttaaataaaatttctatttagttaccctaagtataaatgacctgtcatatatacatgtttaagctattctaaaattataacttatgtatataatccttccctttctgtggtacttgaaggaatgtttagatctatatatggcacaaatgaggggtatatcccttcgcctgttcctcgactccagcagaacattctcgattctccaggtacaaaataatttgctaatagaatccagtttatataggttctgccagaagaaaattcccaactatatttttaatgtgatcaaagaccccacttgacaagaaatagtgaaaaacaagggggaatactggagggaatttagtggaataggagtgacaagttagtgtggtgttcgattggaggtgtgtgtgtgtatacatatatatatatatttttttttaaatcacttaaatacctcatacccattctactaaacaaattttgctgctgaattaaaaatatgtgattagtatgtctaatgctgtgtagtgtgtttcttaaattcccagagaatttgtgttggttttagtttggcataaaaagagaccttcttaaagtataaatatatttttctttaagatgatagaactccaaacatacaggagactgcagatttgacttctgagaaaagtactttaattgctactagaaataggagcagttaaaagaatgtaattttaaatttaatccattacatacatgtaagtcataagacttccattctttatttctagcagtgtgacagtggtaaaccctcttaacttttctggatctcagtttctgcctctgcaaatggtgataattggacttaacacgaaagatatgattcaattgaacaatattatggaaagcatttgttatgagcgctttaactcagaaaaccttcaaatgtttatcatttgaacattgtattattactatgaacactgtctccaaaaccatctcttcaccagctccatctaatgccacttaactcttaatttggatttctttgatgtcctcaaatgtatcctgtgatttggcctatgagttttggcaatggctgttctttctacctggaggccagtttctactggcttcattttttatctcctcctctagtccaagaggcattttgtagttccctttgcatcataccataggatccttgagggctggggtttttgtcttgttcacaactgtttgcccactgcctatcagtagtgcccaacccacaggagatagccaaatagataataataacatctgttttccttgtttgctcttctgaacactgttgtttctttttctggcttgtattgtcatttctactccaatgcctgattgttttggattatgtgctggatattgttttggaaaaaggaacttgtggaaataaatggaggcctaaatgattcacacagaattttcttttggttctgccaggtatctggttaaagtctagtattaaaatactactttaaaagttatattttttcccctcaacttttcattttgaacatctccaaatctatattgaaagatttatgcaatgaacttgtaatatttttaccaagatgttggtgttttgtcatgtttactttattatctgtatgtatgttagcattattttttatttttttcattgacattaattctgatttagaacagtctctgccttttctctcacttgacagtgagtcttgacaacctaattcatttcttaaatacctccagactttactattttaaatattacaaaaattgttctctggtttcttctgaattacagaaatctgagtgttgtgatactaatctttgaaatccttcctgtcttaagaaaatgtctttttggatcatagagtagcagtatccatgatggtggaaccttgcctggcatttagtaggcatttgataaatacttgcttaatgaaggttttctgcttaagggcctccataacttgatcatatcctacatatttttcttttgtttctttttgtttcctgggataaatcttccattaaatttagactgatctccttctaggcttacctgtgttaatgatttttgcctccttagttatttatacttagttaaataccctagagtatttctgtctttagaattcttagttcattttggaggatatgccatgtatttcaaaaataattttggatgattaaccaatagaaagttctgctttgtttaacccctcttccagtagttcagtgagaagtgatattatctctaaaattcaacacattgagtgttggccactggttaattgttaattctgaaaattatttaggattagatgagattgtacacttgagggagaagaaaggatgctagaaaaaaaattagttctgaacttaccattaactgtttatgtgactgtattatgcaagtgactaattttcctgagatcacttaaacagtatgccagatgattgtgctactggtttacctactttttgtgtttaatgagagctgaatttacatccaaaaaaatgtagattttaagtatatgaaggttgcctacttttaaggatggctgtgaggattaaatatagtcaattctcctttaatgtagagtaattttggttatcaaaaagttatacattaatccacaatttaatcaaaatagtataaaatgactcatgtcagtttatagttttaaaatgacaccagtatttaagaaaacatagacttttgtatagaggttctgtcaaaaaaattaagcttaagtagcatcaatttgctactgctcaaactgcttaattttttaaccaagcagttggtaatttgttggttgttagccttttttaaaatattgctactttcagagaaactcataaaagctatagaagaggccttcttcctagaacagtgcactctaatcacttttgaagttaaaccaatgccatggaaagcaagctattcaacaaaattttgtgtgtatttaaggggttcaggacctccctaaactccaactcgagtttaaaaagacttatctagggaattcagccacgtatatgacagattttagctagtcttctcccttattgccatttcattccctgtatccacctcctccctccctgctatcccttataattgatattgttgctcattacctgaagcccatatatcaaaatcagtattttcatcaacttgcaaatgggtgtgaggcgttcctaatatgtagtacatacaatgtgctttattaggtttaatacacaaacacctggtcttttttctccattcttttgagaatgaggactgttgactgtattttgagatacagataaaagtgttttgaaaagcataaagcactctacagtattttctgaaagtgtcataatgacttttatcagtaatatttcctgagcccaaatttttacactatattttatgcccacttcgttgcagggtaggatattgacagaaggttaattttaatttgcaaatgatctattttgttctgtaaaatatgctggaacattaatggtaatttagatgtatagaaaacttgtgatgactacatgaattttatttttaagccatacagattgtagttactctcaatttctttttggaagcaatgagggtatgagtaagatacttcccatatggccacaccagacatttctatcatgtgacccttatgggattcaatgatcttgaaatcctttagtttgaccaggtgcggtggctcacgcctgtaatctcagcattttggggcggcgaggcaggtagattgcttgagctcacgagttccagactggcctgggcaacatggtgaaaccccatctctaccaaaaagacaaaaattagccgagtgtggtggcatgtgcctgtagtcccagctacttgggaggctgccgtgggaggatcccctgagcccaggaggaggaggttgtagtgagccttgattgacccactgcactccaacctggacaagaaaacaagaccctgccataaggaaaaaaaaaaagaaaaaaagatctttagtttgtggggtgtgtcacacagcatattatttactttgtttcaggtacctatggagttgtgtataagggtagacacaaaactacaggtcaagtggtagccatgaaaaaaatcagactagaaagtgaagaggaaggggttcctagtactgcaattcgggaaatttctctattaaaggaacttcgtcatccaaatatagtcaggtatgttgtaatatctgaatgtaagccattttctgcatgctatttcaaatataaatttcaacttggaaatctttacatttgctcaatttcttggtctagccttactgagtggactagaaccctatttttggtagttgagaatgccgcacatatgtaaaagagaacaggctgttaaagcaggaacagagttggaggagctgggtgatgtagattaatatttgggcctagaatagcaaggtaaattggccatgggagtaaagccgttttcatagagctttgtcaactctctcctacttggggaactctagttcctgaagaccctttagttagagtcttaagaaaagtagctaggtcaaatgaaaaagattttttttccttaaagtatttgcattgggtgtttttggagacctgtcttcctaacagtccaagttaaaatctaattgtacttggctggggctagagattggaagtagcttttaaggtcagataccactttaaaatttatttgtataattcacttcaatgaaaaaataagctctcagcaattagtagccaacctagatatgttcttttgaatacaggctccttataaataagcacctcctgtacaaggcttaattttaaatagttgccctgagattcctttcttaaatttgagttttgagtctcttccattagggaagctactacgtcttccccagtttttattatagcaactgaaattatggaaggagttttattttgtgaaacagaggtcaaaaatgtttgctggattcttctctcatatattttttttccccagtcttcaggatgtgcttatgcaggattccaggttatatctcatctttgagtttctttccatggatctgaagaaatacttggattctatccctcctggtcagtacatggattcttcacttgttaaggtaaaagcttaactaattttattaatatttatgcactgtggatataaagggactatatatagaagtccctgcattttgtgggaatatgcttggaaaaagtgttagaataagaaaaagtatttcatttttctccctcatggttagtttatacaggttagagatacccatgttattaccagatagtgtttctagtaagtaaaaattagtgcctgagataacatagaactggtaagtattgttggaagctagggtagtctggtctttctttggctgtcagatacatgtaaaacaaagtaatgaaagcctagggcagagtgg

SEQ ID NO: 942 - DNA, 10078 bp, Homo sapiens
gcacttggcttcaaagctggctcttggaaattgagcggagagcgacgcggttgttgtagctgccgctgcggccgccgcggaataataagccgggtacagtggctggggtcagggtcgtgtctaggggacggccgagggcctcggagggcgagtattgaggaacggggtcctctaagaaggccggactggaggtcagggatctgcgcggggcccggctgggcctcggggggcggtgggcagggccttcgcctgggtctggccgtgtgagccacactgggctggctttagagggaggctatgggagcccagcctggcggggttaggcggcgtgggggtgggggttcggggctgcagtcatgagtcgaggtcggctgttctcaggcaactgcctgaagaggctttcgggtcttgattgaagcaaaatccgctcccccacgctgagcgcctgcggagtagcaggctctttcctgggcccggcccctgcgcgccctgccatcccgcctcgggggtgggaaagtgggaccgcacctgggccaggtacaggcgcgggtccctagagccaggccgccctgagaaaccgatcctggaactcgtgggccttcttgggcttgctctgcccacggccccggcccacctggagctgttaagaacagtcagcccaggcacttaactctcatgagcagtgtagtgcagtttttttcatttaaaaagatacatctctgcttctttctggattgatttttctttgaagatgaatgtgagaaatagaacttaaaggtctattctgagtgtgctttataaatgattttatcatcagtgatgggtgttagaaaaatctaggtaattatgcctggagttctgacgtttcattggcaaacttcagaggaagtcttgaacttctggttgtcagcttttttttttaacccattcattgtgattcaagtataccgtttttctgcttagtccttgacattgtttaggttataattagaattttatctgtggaattgcacttttcattcttttgttttacggtgcttaagtgatatttcctactcttggaaaaagtaccttgaaagtcttgagcatgtttgtctgtgacctcagcaagcagaggaaaaagattaaaattgtcacgtgggcaactgtaaacacttaaaatgtttttgtcgttttaaacaaaattttcctaatgaacagtctgaacacattttagttctgtcctcataactttaaaaaataatgttttgaataaaattaggagtatcataaagcggtataaatttgttgaaatatttgggtataactttggcacacgcaggtactactttaaagtgtcacaaaaagggaacataattctggtttttgtttggaaagaatagacaagttgatacctgaatttgagggttattttgattggaagaagctaaatactacactagtatagaatatacacgtttccaatgtctcaggagtcaagaaggatggaaagttattgtaggagtccttacccttgtaaatattgtttgaatgtaattaatatttatggaatacttatgctgcagtaggcactgtggaaaatgctttacatatagtgtttcattaatgcttaaaactactcgagttagtggcatgtaattaagtcagtttttccttcactttaggatctaccatacccattgactaactatggaagattataccaaaatagagaaaattggagaaggtgagtggttttagtaaaataaattttatggaatgatttaacaatgctacaacttctgtaatatgaacacatttaaatatttattaaaattcaaccattaagttgtcttgtagtaccagtgtgcattaacatatgttctttacttaataaacgcaaatttgctcacatttcaagagaattgaaattaccgaatccctaatgaccgttcgcctcacccccatagtcttacagtcttctgatactaaacacttatagtagtacttgtattttgaagacactattgataacttgcatgtgtgagaggggcagaggttagggctgcagaattatgctaacttcataatatatttttagttttagtctctttcaattgtttttaggatgatagatatttttatccagactttatagactggttacaataattgacttaatctaatttaaataaaatttctatttagttaccctaagtataaatgacctgtcatatagacatgtttaagctattctaaaattataacttatgtatataatccttccctttctgtggtacttgaaggaatgtttagatctatatatggcacaaatgaggggtatatcccttcgcctgttcctcgactccagcagaacattctcgattctccaggtacaaaataatttgctaatagaatccagtttatataggttctgccagaagaaaattcccaactatatttttaatgtgatcaaagagccccacttgacaagaaatagtgaaaaacaagggggaatactggagggaatttagtggaataggagtgacaagttagtgtggtgttcgattggaggtgtgtgtgtgtatacatatatatatatattttttttttaaatcacttaaatacctcatacccattctactaaacaaattttgctgctgaattaaaaatatgtgattagtatgtctaatgctgtgtagtgtgtttcttaaattcccagagaatttgtgttggttttagtttggcataaaaagagaccttcttaaagtataaatatatttttctttaagatgatagaactccaaacatacaggagactgcagatttgacttctgagaaaagtactttaattgctactagaaataggagcagttaaaagaatgtaattttaaatttaatccattacatacatgtaagtcataagacttccattctttatttctagcagtgtgacagtggtaaaccctcttaacttttctggatctcagtttctgcctctgcaaatggtgataattggacttaacacgaaagatatgattcaattgaacaatattatggaaagcatttgttatgagcgctttaactcagaaaaccttcaaatgtttatcatttgaacattgtattattactatgaacactgtctccaaaaccatctcttcaccagctccatctaatgccacttaactcttaatttggatttctttgatgtcctcaaatgtatcctgtgatttggcctatgagttttggcaatggctgttctttctacctggaggccagtttctactggcttcattttttatctcctcctctagtccaagagcattttgtagttccctttgcatcataccataggatccttgagggctggggtttttgtcttgttcacaactgtttgcccactgcctatcagtagtgcccaacccacaggagatagccaaatagataataataacatctgttttccttgtttgctcttctgaacactgttgtttctttttctggcttgtattgtcatttctactccaatgcctgattgttttggattatgtgctggatattgttttggaaaaaggaacttgtggaaataaatggaggcctaaatgattcacacagaattttcttttggttctgccaggtatctggttaaagtctagtattaaaatactactttaaaagttatattttttcccctcaacttttcattttgaacatctccaaatctatattgaaagatttatgcaatgaacttgtaatatttttaccaagatgttggtgttttgtcatgtttactttattatctgtatgtatgttagcattattttttatttttttcattgacattaattctgatttagaacagtctctgccttttctctcacttgacagtgagtcttgacaacctaattcatttcttaaatacctccagactttactattttaaatattacaaaaattgttctctggtttcttctgaattacagaaatctgagtgttgtgatactaatctttgaaatccttcctgtcttaagaaaatgtctttttggatcatagagtagcagtatccatgatggtggaaccttgcctggcatttagtaggcatttgataaatacttgcttaatgaaggttttctgcttaagggcctccataacttgatcatatcctacatatttttcttttgtttctttttgtttcctgggataaatcttccattagacttagactgatctccttctaggcttacctgtgttaatgatttttgcctccttagttatttatacttagttaaataccctagagtatttctgtctttagaattcttagttcattttggaggatatgccatgtatttcaaaaataattttggatgattaaccaatagaaagttctgctttgtttaacccctcttccagtagttcagtgagaagtgatattatctctaaaattcaacacattgagtgttggccactggttaattgttaattctgaaaattatttaggattagatgagattgtacacttgagggagaagaaaggatgctagaaaaaaaattagttctgaacttaccattaactgtttatgtgactgtattatgcaagtgactaattttcctgagatcacttaaacagtatgccagatgattgtgctactggtttacctactttttgtgtttaatgagagctgaatttacatccaaaaaaatgtagattttaagtatatgaaggttgcctacttttaaggatggctgtgaggattaaatatagtcaattctcctttaatgtagagtaattttggttatcaaaaagttatacattaatccacaatttaatcaaaatagtataaaatgactcatgtcagtttatagttttaaaatgacaccagtatttaagaaaacatagacttttgtatagaggttctgtcaaaaaaattaagcttaagtagcatcaatttgctactgctcaaactgcttaattttttaaccaagcagttggtaatttgttggttgttagccttttttaaaatattgctactttcagagaaactcataaaagctatagaagaggccttcttcctagaacagtgcactctaatcacttttgaagttaaaccaatgccatggaaagcaagctattcaacaaaattttgtgtgtacttaaggggttcaggacctccctaaactccaactcgagtttaaaaagacttatctagggaattcagccacgtatatgacagattttagctagtcttctcccttattgccatttcattccctgtatccacctcctccctccctgctatcccttataattgatattgttgctcattacctgaagcccatatatcaaaatcagtattttcatcaacttgcaaatgggtgtgaggctttcctaatatgtagtacatacaatgtgctttattaggtttaatacacaaacacctggtcttttttctccattcttttgagtaatgaggactgttgactgtattttgagatacagataaaagtgttttgaaaagcataaagcactctacagtattttctgaaagtgtcataatgacttttatcagtaatatttcctgagcccaaatttttacactatattttatgcccacttcgttgcagggtaggatattgacagaaggttaattttaatttgcaaatgatctattttgttctgtaaaatatgctggaacattaatggtaatttagatgtatagaaaacttgtgatgactacatgaattttatttttaagcccatacagattgtagttactctcaatttctttttggaagcaatgagggtatgagtaagatacttcccatatggccacaccagacatttctatcatgtgacccttatgggattcaatgatcttgaaatcctttatttgaccaagtgcggtggctcacgcctgtaatctcagcattttggggcggcgaggcaggtagattgcttgagctcacgagttccagactggcctgggcaacatggtgaaaccccatctctaccaaaaagacaaaaattagccgagtgtggtggcatgtgcctgtagtcccagctacttgggaggctgccgtgggaggatcccctgagcccaggaggaggaggttgtagtgagccttgattgacccactgcactccaacctggacaagaaaacaagaccctgccataaggaaaaaaaaaaagaaaaaaagatctttagtttgtggggtgtgtcacacagcatattatttactttgtttcaggtacctatggagttgtgtataagggtagacacaaaactacaggtcaagtggtagccatgaaaaaaatcagactagaaagtgaagaggaaggggttcctagtactgcaattcgggaaatttctctattaaaggaacttcgtcatccaaatatagtcaggtatgttgtaatatctgaatgtaagccattttctgcatgctatttcaaatataaatttcaacttggaaatctttacatttgctcaatttcttggtctagccttactgagtggactagaaccctatttttggtagttgagaatgccgcacatatgtaaaagagaacaggctgttaaagcaggaacagagttggaggagctgggtgatgtagattaatatttgggcctagaatagcaaggtaaattggccatgggagtaaagccgttttcatagagctttgtcaactctctcctacttggggagctctagttcctgaagaccctttagttagagtcttaagaaaagtagctaggtcaaatgaaaaagattttttttccttaaagtatttgcattgggtgtttttggagacctgtcttcctaacagtccaagttaaaatctaattgtacttggctggggctagagattggaagtagcttttaaggtcagataccactttaaaatttatttgtataattcacttcagtgaaaaaataagctctcagcaattagtagccaacctagatatgttcttttgaatacaggctccttataaataagcacctcctgtacaaggcttaattttaaatagttgccctgagattcctttcttaaatttgagttttgagtctcttccattagggaagctactacgtcttccccagtttttattatagcaactgaaattatggaaggagttttattttgtgaaacagaggtcaaaaatgtttgctggattcttctctcatatattttttttccccagtcttcaggatgtgcttatgcaggattccaggttatatctcatctttgagtttctttccatggatctgaagaaatacttggattctatccctcctggtcagtacatggattcttcacttgttaaggtaaaagcttaactaattttattaatatttatgcactgtggatataaagggactatatatagaagtccctgcattttgtgggaatatgcttggaaaaagtgttagaataagaaaaagtatttcatttttctccctcatggttagtttatacaggttagagatacccatgttattaccagatagtgtttctagtaagtaaaaattagtgcctgagataacatagaactggtaggtattgttggaagctagggtagtctggtctttctttggctgtcagatacatgtaaaacaaagtaatgaaagcctagggcagagtggtggttgtaggtgttttattccagttttgaacatgttttggtcaatttattgtagacatttattatatttcaggtaaattataaaattgtatagttttaagtactgaagtatataaaagtgtcttattcttgcaccagttctaccaaaccactctgcagaggtagcgctgttagttttatttgtaatcttacacttgtatgtatgttcactttgtatgtatataaagatttttttttttacacaaggtggacttatttgcatatgtatatatacatattttcccttttttgtgtaaaacattatcaagacgtagatctacctatgtctatttacatttttgatataattaaaccacttccatattgatgaacatttaaattattttccaacttggttattgttgctcttattaacagtactgcactgaatgtccttatagatatttatcttcgtatgcaactttataggataaatttttagaatgggaatgatggattgaagatgtttatttacattttgatagatattgccggttgccccctaaaaaacttgtagcaatttactcttaaatactcatggtgtgtaatacttattgttttagtacatcattgccaaaacttggttttatcaatctgttaactatgtgaaaaaggcatattaagattgttttaattttatatttcatgacaatttaacacttcatatttagctattataaaccgcctatattttcgttaggatacgttctttaacaatcttgcatgacttttggactttctgcttttatgtcttgcttaagtcttcctcactcaaagatcgaatgtattagaataatacatgtcagtatttttctggtagttttagtaagtcctgtcttcacacatactttttttgtcttaattctgtattaagattaattttgacttataaactgggatacagaatttgctttatctttttccaaatggctagccagttgttctaactggttttatgtacaggcaacaatggttttacttacaatttttcagttttacaatgaagcagaaatgatgcacattcactagaaaccatacttcatttacccatacaaccattctgttttttcactttcagtacagtattcaataaataatgaggtattcaacacttccaactatatgctaatgtaagtgttttgagcacaattaaggtgggctacgcttagctacgtttggtaggttaggtgtgttcaatgcatttcgacaaggtattttcagcttagaatgagtttaaccagatggatcatccgttttgttttgttttttgaacaccacttgtccctctaagatggagcatctgtattactttccaatttcaaactgtaagtcatttttctgtgtactttgtttttgtaatatccatgctacttcagatgtcaatgacattgtctttggcaacaaatgtcttgtaaagcacttttctctgaactaagcagcattttatgataattttatccattgaaatatataatcataatatctttgccatcacttttagaatctaattttttcaagaaggaaatgaatatgtaaaaatgaaagatagaaaaggccaactgtattgaagatacaaaatagagttggtagcggtatatagaagaaaaatcaagaggcttctgtgtagaaaaccaatttgtaatttaaggatcggggaccaaaaatgtttaaagactaaatgtgttcacattactatagatatgtctataaggtgaagattcttttcttaggtatacaaatgtgatgttgtatataaatgggcttcccacccacaaatgcttattagcctaaaatggcctgaaagctctagtaattaaattatttctctgcgtcctaattttttgtctttgaaacagattatttagaaaatcatgtacttcgcttaagtttctaacttttacttgctttttccagagttatttataccaaatcctacaggggattgtgttttgtcactctagaagagttcttcacagagacttaaaacctcaaaatctcttgattgatgacaaaggaacaattaaactggctgattttggccttgccagagcttttggaatacctatcagagtatatacacatgaggcaagtggaatagtggtttttgatggcttttgaatgtgtgtgattgctagattattttctgtatttgtgaaagtcaagaaataactcaataaaagatatctactctgtggcagtatcaatttattgcctctcagctccaaattcattgcatgctatgtgaaaatggaactgaagcctttaagtattttttctttaccagctgctatgttgttaaggtagagggtactagagggacatggcaggaggaaggagttttcctagctacagtttttacattttcattattttttactttatttatttacatcattcccatcctttgttg

SEQ ID NO: 943 - DNA, 1115 bp, Homo sapiens
ggccatgtctgttttgttcatctggatgtcttccgtatattttaaatgttggttgactagaacagtgaatgaatgagtgatttgtaacaggttgctgtgactctgtactttcatggagaagaatttcagcagctagtcactgttaacttaatttgttctctctacaagcatctgatgagcagttaatatgtgcaagctaaggcacattatctatcttcaaggagattctggtgaaagagacagtcataaactatcaatccacacagtagaataagtgttacaacagagttatatacagggtggtctgagtacatagtttctcatgctggtgttccaggtagtataattttctgaaattaaagctggtaagaatcaacataccggggatgtgattaaccattcccaaatctcagaaagacattagcctaaactgtaaggagtgtaagataagccgtgctctagttaattgtaactgagggcatgtgctggtgatagataatgtgatggctgataaagaatactgaaaaccagagccacgggaatgtgtcatggcccctttccattagggggagtgcagccccatgccaaatgaatggtcccagctctctagccacaggtggctctgaagatttctagccacagacacccctggacaacacagtgagacctctctagccacagatagccctggagccctgaagtggagaagggcacactgttctgcttcttccatgtacagcctgttcttccagctttgcaaaatgctctgataaattaggagaacactttaaaaattgaccgctcaggccgggcaccgctggtcatgcctgtaatcctcgtactttgggaggccaaagagggtagatcatctgaggtcaggagttcaagaccagcctggccaacatggcaaaaccccatctctactaaaaatacaaaaaattagctggacctggtgacacgtgcctgtaatcccagctacccaggaggctgaggcaggagaatcgctggaacccggaggcggaggctgcagtgagccgagatcgtgtcactgcactccagcctgggtgacagagtgagactccatctcaaaagaaaaaaaaaaaaaaaaaaaagaa

SEQ ID NO: 944 - DNA, 1115 bp, Homo sapiens; identical to SEQ ID NO: 943

SEQ ID NO: 945 - DNA, 455 bp, Homo sapiens
caggtgtttatctctcggcagcagccaattaccaccttgcactcatgcagggcccagagtgcagatgggcttctccaggtaatcctgctccaccctcaacccttggcatgtcctgcatggctatgttaccatggggcctctctcaggccctgtcccactccacatcattctcatgagcatccagtggaggactgtaggaagaaactgagggtacaggttacccttgtgtctggggctcccagtaaactgccactctagctaatgctcagccattaagatttcattaagatactagtcattttctccttatctacttttgcggcaactacctattcctctgtgctctgtcaaacatgaaacagatcatgtgtttcatccatcaaagataatgtgttctagttacctccagaaaccagtttgcttggtggcctgtgaccccagctctccagtaggct

SEQ ID NO: 946 - DNA, 455 bp, Homo sapiens; identical to SEQ ID NO: 945

SEQ ID NO: 947 - DNA, 120 bp, Homo sapiens
aagcttgcctaacatgtattttctctgtaaggaacatcaaagccttctaggaactctagacagtacaatgttctgggaccattttaaagcaacataaagcaaaaaaaaaaaaaaaaaagt

SEQ ID NO: 948 - DNA, 977 bp, Homo sapiens
aaataaacaacataataaacccaaataaagtagaatgaagggatttgagaaataaatattgaagaaaaataaaacaaaaaaatcaatttgagcttattaacaaaattcaaagctagttcttttaagatgtctaatactatagaaacatctttggcctgatatatgaaggagaagagagcaaaaggaaaaggacacagtaaatttaaaagtatgttttaatacaatacaatctatggcagaatgcgtaattgttcacaatactttgcatctccctgtattcatgtcctttgttatgtaaattcgcaattcctcctggtaatggtaaaatatatccacctccattcataatattgtgctggactgtgtgatttactttggcagaagtgccagtgccagttctgaatctaggccttaagggtatcacatatgtccacttatccctcttgtacttcttccatccccaggagaagaatgtgtctctggtagccaattgatccaaaaaggatctgacattttcagatgtggaaccaaggccagccaagcccagccaagcccagcatagatccgatccgccaaagcccaactgtcttacagatgtataaactggaataaatgttgctttatacttagtttggggtggtttactacacagcattattatggctatgctgactagcacactatgttaccaacacattggaaaaaacagaatatgcacataatttttctgaaaaatattttggcaaaatagtcccaagaagaagtagaaaatctgaacaaataaattaacacaaaagaaaaattaatgccaagttctgccaccaccaaatgacatgttctactatgtcttcaaaaagacagattattcttgtcttatataaactattacagaacaggaaaaatggtgagaaatgatccaattcatttttttaaaaaggtagcataacattggtagcaatgccagactagaacagaaa

SEQ ID NO: 949 - DNA, 970 bp, Homo sapiens
agaagttgagtgtttaagactgctgtttgaaggagaagtctagcctcaagacaaaagttcaggactcattagctgagaaatggcactgaaaattatgtaaatggatgagctcagatagcaaacaagtccagagagagcagaaagtccagagagagcagcactgggctatgcatctggcctaatgccaccccgctcctcccaatccttgtgttatgcaggagagggttcagcctctggtgagtttcaccaaacccccacatctcttacttctgagaccttctctaaaatcccctcttttatacttagtgaaatgggattctctttttcccatctagcttaagcagaaacttttgactatgagaagaatgaggatgcatttagtatctgttctgcatggctaattccatcaaagatttctcattattcatgcctggcagtctcattttcttcttttgcctctaagagcacagtcgtagccttaattacggaccttttcactcttctaataccagcgatttaccccatctcagttctcaggaagttctgttcgcagaattatctcctgaatcctcacctggagatataaattgttctctgtggccatttcttcctactctaattcttatcaaaaaactcagtgatctctgtgcatcaattattaaactcaagctcaacagatcatgattctggcttgtctgtctctcctgcctgtgggttaacaggtatgcaacctttgcagaggagacaccaaattctcaggaggccagagtttccaaaggtactggtcactcttgctctctttctcctgctcaaaattcagcactagagagtgttacaccatagcacctgcagaggagttcatctgactctagggactacagaggagagagatggacaaactaacaggcattcagaaaacgactaccacaatggggaagaaaatgaaagtcaaaccaaataagcaatgatc

SEQ ID NO: 950 - DNA, 1382 bp, Homo sapiens
ttttttttttttgtagacagggagtctcactgtgtttcccaggctggcttcaaactcctggcctcaagtaatcctcccacctcggcctctcataccactgggattacagccatcacctactcctccaagccacgagtttggctttggatgtcacaaggttgaggtgttcatgagatgacaagtggaaaaaacaagaaagaagttgagtgtttaagactgctgcttgaaggagaagtctagcctcaagggaaaagttcaggactcatcagctgagaaatggaactgaaaattatgcaaatggatgagctcagctagcaaacaagtccagagagagcagaaagtccagagagagcagcactgggctatgcacctggcctaatgctaccccgctcctcgcaatccctgtgttatgctggagagggttcagcctctggtgagtttcaccaaacccccacatctctttcttctgagaccttctctaaaatcctctcttttatacttagtgaaaagggattctctttttcccatccagcttaagcaaaaacttttgactatgagaggaatgaggatgcatttagtatctgttctgcacggctaattccatcaaagatttctcattattcctgcctggcagtctcattttcttctttcgcctctcagagcacagtcgtaggcttaattactgaccttttcacccttctaacaccagcgatttcccccatctcagttctcaggaagttctgttcccagaattatctcctgaatcctcacctggggatagaaattgttctctgtggccgtgtcttctcctctaattcttatcaaaaaactcagtgatctctgtgcatcaaatattaaactcaagcttaacagatcatgcttctggcttctctctctctctggcctgtgggttaacaggtttgcaacctttgcagagaagactccaaattctcaggaggccagtttccaagggtgctggtcactcttgctctctttctcctgctcaaaattcagcactagagagtgttacaccattgcatctgcagaggagttcatctgactctagggactacagaggagggagacggacaaactaacaggcattcagaaaatggctaccacgatggggaagaaaatgaaagtcaaaacaaataagcaatcgtcaaaaaaaaaaaaatctggaggccagctgcagtggctcacacctgtaatcccagcactttgggaggcagaggcaggtggatggcttgagatcaggagttcgagaccagcctgggcaacatagtgaaatcacatctctactaaaaatacaaaaattagccaggtgtggtggcaggcgcctgtaatcccagcattttgagaggctgaggtgggcggatcac

SEQ ID NO: 951 - DNA, 9218 bp, Homo sapiens
tgtggtcatcatataatttatcacatgcttaattgcacatgtttgactaagaaaaacacaaagtatttaagctcatctgtagttcaaagtgcctatccgtgtatttgtccattcatcctgatttatttattgagcaactcttttgtaccaggcactgtgctgggtggtggtaatgcaatgatgaaaatggcaggcatggctctgccctccaggagtttctaggatacagagggagacaaacaaaaaataagtaaatccatgaaagaagtattggtggaacctgccccccaatatttcaatgtaggttctttctgttttccataagtgtcagccagctgagaaataaagagagacactacaaagagaggaattttacagctgggccactgggggtgacattacatatcagtaggaccatgatgtcccctgagtctcagaccagcaagttcttaattaagggtttcaaaaggggaggcagtgtaagaacagggagtaggtacaaagatcacatgcgtcaaagggcaaaaagcagaactactactaagggtctaaaaaagatcacatgcttctgagggaacaggacaaagggcaaaagcagaactactgataagggtccagcaaagatcacaaagcaaagggcaaaagcagaaccactgataagggtctacgttcattggcgcatgtattgtcttgataaacatcttaaacaacagaaaacagaaaacaagagaaccagtctgaccacagatttaccagggcagagttttcctccaccctagtaaggctttgggtactacaggagaccagggcgtatctcagtccttatctcaactgtgtaagacagacattcccaaagcggccatttatagacctccccccaggagtgcattcctttcccagggtattaatattccttgctaggaaaagaatttagtgatatccctcctacctgcacatccttttatagactctctgcaagaagaaacatatggctctttttgcctgaccctgcaggcagtcagaccttatggttgtcttccctttttccctaaaaatcactgttattctcttctttttcaaggtgcactgatttcatattgttgaaacacacatgttttaaaatcaatttgtacagttaacacagttatcacagtggtcctgaggtgatgtacatccttagcttattaatataacaggattaagagagtaaagacaggcataagaaattataaaagtattatttgggaactgataaatgtccataaaatcttcacaatttatgttcctctgccacagctccagccagtccctccatttggggtccctgacttcccacaacaagaaataataagaggttaaggtggagaagagcagggaagtccactttataaaggggtcaggaaagagctctctgtggaagcaccattttagctgagacctaaaggatggtctaatttggggaggtgcagaggaaaatcattccaggctgaagcagcaagtgcaaaggccctgttgtggaaaaaggtttgaaagtccaacaaaacaaaaggaggccagagtggctgaaatagagtaggccaaggggaggagataggagagggctggagaggcggcagggtcaggcagaagactcagggtcttgattttattctatgtgccatgggcaggaaaggcaagggtgagactcaatggacaccttaagatcactgaagctgccaggtgggaaatggattgctgagcatcaagagtaggtgcagaggaccagttaagaccagttaggaggctgctgctgtagcccagctgggatagcagtgccctaggcaaagataacaacagtgaagttaaagagagtggacaagttgggtaaagtttagaatcacaggacttgctgactggagaagagggcaaaagcagagttagcacaacacatgagttatgaccaccttgagcagctcagcagggggtggtgccatttacagaacagagatggcatggacagagcccatggagaaggaggaggaaaaagagagtttggctttgggtttttttttaagacagggtctctggctctgtcacccaggctggagtgcattggtgcgatcatagctctttgcagcctcaaactcctgggctcaagtgatcctcctgcctcagcctcccaagtagcaggattacagatcctacagatgcacttcaccatgcctagctaatttttttttttttttttttttttggtagatagggagtctcactgtgttttccaggctggcttcaaactcctggcctcaagtaatcctcctgcctcagcctcccatagcactggggttacagccatcacctaccactccaagccatgagtttggctttggatgtaacaagatggaggtgttcatgagttcacaagtggaaaaaacaagaaagaagttgagtgtttaagactgctgtttgaaggagaagtctagcctcaagacaaaagttcaggactcataagctgagaaatggcactgaaaattatgcaaagggatgagctcagctagcaaacaagtccagagagagcagaaagtccagagagagcagcactgggccatgcacctggcctaatgccaccccactcctcccaatccctgtgttatgctggagagggttcagcctctggtgagtttcaccaaacccccacatcttattcttctgagaccgtctttaaaatcccctcttttatacttagtgaaatgggattctctttttcccatccagcttaagcaaaaacttttgactatgaaaggaatgaggatgcatttaatatctgctctgcatggctaattccatcaaagatttctcattattcatgcctggcagtctcattttcttctttcgcctctcagagcatagtcatagccttaattagtgaccttttcacccttctaacaccagtgattttcccccatctcagttctcaggaagttctgttcacagaattatctcctgaatcctcacctggggatagaaattgttctctgtggccgtgtctccccctctaattctcatcaaaaaacagtgatctctgtgcatcaaatatgaaactcaagcttaacagatcatgcttctggcttctctctctctctggcctgtgggttaacaggtttgcagcctttgcagagaagacaccaaattctcaagaggccagagtttccaagagtgctggtcactcttgctctctttctcctgctcaaaattcagcactagagagtgttacaccattgcacctgcagaggagttcatctgactctagggactacagaggagagagacagacaaactaacagacattcagaaaagggctaccacaatggggaagaaaatgaaagtcaaaccaaataagcaatggtcaaaaaaaaaaatctagagggcagctgcagtggctcacatctgtaatcccagcactttgggaggccgaggcaggtggatcacttgagatcaggagttcaagaccagcctgggcaacatagtgaaatcacatctctactaaaaatacaaaaattagccaggtgtggtggtgggagcctgtaatgtcagcattttgtgaggctgaggtgggtggatcacctgatgtcaggagtttgagaccagcctggccaacatggtaaaaccctatttctattaaaaaatacaaaaattagccaggtgtggtggcaggtgcctgtaatcccaggtacttgggaggctgaggcaggagaattgcttgaacccaggaggcagaggttgcagtgagcaaagattgcaccactgcactccagcctgggcaacattgagacattgtctggaaaaaaaaaaaacaaaaaacctagaaatgtccatccaggctgaagagaatattccagagcaggggttgggatactatggcccatggccaaatctgacctgcatgcacatgtttttgtaaataaagttttattgaaacacagttatgcccatttgctacatattgtctatggctgctggattaggctgttctctcatgctataaagaaatacctgagattgggtaatgtataaagaaaagaggtttaattggctcacagttttgtagactgtacagggaagcataacactgacatcagctgagcttctgtggaggcctcaggaaacttacaatcatggcagaaggtgaagtgggagcaagagagtgaggagggaggtgctacacactcgtaaacaaccagatcttgcaagaactcacttactattgcaaggacaggaccaaagggatgatggtaaatcattcatgagaaatccacccccatgatccaatctcttcccaccaggccccacctctaaaactgggtattacattgcaacatgagatttgggcggggacacatattcaacctatatcagctgctttcatgctatgggtggcagagttgagtaactactacaagagactgtatggcccaagaattgtaaaatatttactatctgatgctttcaagaaagtttgcaaagcctgctcttgaaaaggaatggaaggaagaggagaggaggaaggcaggaaggagcagagagggacacggggctgtattcaaacatctgttgttaagaaagagaaattcaatttatttggcatggcccaagttatcaaactaggagcactccattgaagtttcagaacaaacactgtgctgaatataaggatgaccccatctgtaatgcctaaccttgtttttactaactttgttggtagactttccttttcttttaatcacttagccttgtttctacctgaattgactttcttttagctaagagagctagatagactttgtcttggctttttcactggcagccccttcctcaaggacttaacttgtgcaagctgactcttagcacctctaagaatgcaattaagtgataagatactgtgggacgagcaatatccgcagttactaggaatttgtctgattgataacacccaaagccccgcgtctatcactttgtaatagtcttaaagcccttagacctagaattgtttactttcctgtaacaatttatccttttaacttctttgcctacttctgtaaaattgttttaactagacccctttcccctttctaaactaaagtataaatgaaaatctagccccttcttcagggccgagagaactttaagcattagctgtatcttggccaccggctaaatagactcataattcgtctcaaagtgtggcattttctctaactcgctcaagtacaacatttggaggccccagtgagaaacgccaccaggcgagagccaggcttgctccggccccccccggaagaacggccggattgtagtgggggcgccacttgaaaaaaaattttcaggtccctgaaaggtgaccgtcttccagaggaaagcggatcgactaccgtgtgggtgcccacaaaaattccacctctgagtcctcaacttctgaccctgaggtcaggtaggtcagatttgacttcagttctagtaagagggaagcggcccttatgagggcatccctcttttgactctgcccatttctctaggacgctagaaggcagagccctggttttctgttaggcacctctgtgtctctgtctaggagggaagtggccctgataggggccctcccttgactcagtccacatcccaggatgctggaggactgagtcctggtttctggcagaccggtcactctctctctcgctctctttttctatctctcatctttctcttgttccagtttcttgaagaatctccaagaaagaaaaaaaaactgttttaaactctgtgtgaataatgaatgaatgagggaggacaagggcttgcgcttgtcctccagtttgtagctccacggcgaaagctacggagttcaagtgggccctcacctgcgattccgtggcgacctcttaaggcttaaggacagcatcaggcatagctcgatctgagccggaagtttataccgggctgccaatgctaagaggagcccaagtcccctcagggggagcggccaggcaggcatctgactgatcccatcacaggaccccctccccttgtctgtctaaaaaaaaaaaaaaaaggaagaaactttcataactgtttacatgccctaaagtcaattgtttatgttgattgttctgttcagtgtctactgtcttgttagtagttgtcaaagttttgcatgtcaagacgttgatattgcccaagacatctaagtaaaaacttcttcaaagtccttagtgctgatttttttgtcacaggaggttaaatttctcatcaatcgtttaggctggccaccacagtcctgtcttttctgccagaagcaagtcaagtgttgttacaagaacaagagtgaaaaacatttgcctgattaagatttctagcaccatgaaagttgtaagtatttagattgtcacaccctacatccaagtgattagacctcctctaatctaaaccagtagtaagttcaaaacagccaccctgcagatttccttgctcacctcttttgtcattctgtaacttttcctgtgccctgaaatagaacgcacacccgtactactttacttcatcgagattcttactctgttcctctgtggctactctcccatcttaaaaatgatctgagtagtcctttacgcgtcgttcctgccccctaccctgcacatctcattttccggtgtgacagcaagttcagcatctccatgactttgctctgctctcactccttaaacccttaaaagaaaaagctaagcctaagctatttgcctttaagtcataaagacaccagaagtatttaaagtacagatctagaagaagaagaacgcctagatcaaactgacccagaagatctcaggctggctctagtcctcctccctcaatcttaaagctacagtaatgtagcaagtagtatgagctgttgtagtttttctgctctttctagtcatgttgattctgttctttcaatactccagtcccccaagaaataagtttctctgtccatgttaggtttaatatttatgctcaaatcttattaaattgccttcaaaaaaaaaaaaagaaacacttcctcccagacttgtaaaagttaaagccctctccaatgtgtgctgcagaattttcctctcagtttctcagaggattataaagtccgccttgaaacaggcaagctccagacactctgcaaaataaaatggccaaagtttaaagtccagtggccccctgaagggtcattgaacctcacaattgttcaagctgtgtggccggttgttactaaaactcctagccaccctgatcagtttccctacattgatcaatagctaagtttagtcaggagccccctccatggctccgctcatgcgccattcataattctacctccaaggtcctcctaagccataccgccttttcatctcgaccctcagccggtttggcttctcctgtactgcctccctctgaagaagggggggagtctccctcacccagtcccaccgccttacaaccagcctgctcccttaaagttatcccatgtctcctcgacgacgtcccctgtagactcgccacccattgcctctcaatcgcgaccgtgacaggaagaagtagcccctctactaccactgagagaggcacaagtccctccaggtgacgagcgctcagcccccttcttagtttatgtccctttttctacttctgacttatataattagaaaacccataatcctcccttctctgaaaagccccaggctttgacctctctgatagagtccgtactccggactcacccgcccacctaagatgattgccaacagctccttttaacccttttcacctctgaaaagaaagaacgtatccaaaaagaagccaaaaagtacttcctcacatcagccaatggaccggaaggagaagctagagacctccttgaggaggtctttccctctacccggcctaactgggacccaaattcctcaagtagaaagagagctttagacgattttcaccggtatctcctcgcaagtattaaaagagccactcagaaacccataaacttgtctaagaccaccgaagttgtccaaaggcccgataagtcaccaagaacgttttagagcgcctccaggaggcttatcggatttacaccccttttgacccggcagctcccaaaaatagccgtgctcttaatttagcatttgtggctcaggcagccccggatattaaaaaagaaactccaaaaactagaaagatttgctagaataaatatcagtcagcttttagaaatagcccaaaaagcttttgaccatcaaaaggttaaaaaacaaaaacaagcaacacaggcagctgaaaaggccgctgataaagcattcaaaagacaaacaaaaatcttagtggcggctatccaagaagtacagaatgaaatatcccgttaatttagcattaactgaagcccctgctttagccctccctaatatctccataaaaaccaaggagttgctaaagaggtgcttactcaggctttaagaccctaaagacgcccagtggcctatttatctaagaggctagatcctgtggcctctagatggccaagttgtctgcgagccgtagaggctacagcaagcctagtccaagaagatgataagttaactctaagccaaaatttaacccttacagctcctcatgctgtaaagaccttactacgaagtgcttctggcaaatagatgtcaaatgctcgcatcttgcagtgtcagttagatcagcctcgtttgactttctctcccacaaagtgtttcaatccagccacactacttcctgacccagactgcactattcctgctcatgactgtcaagaactgttagaaactatccaaactggcccatctgatcttcaagatgtgcccctagaaaaggcagatgccgccgtgttcacagacagtagcagcttcctcaagcaggaagtatgaaaagccagtgcagctgttaccatggagacagatgtgttgtaagctcacgctttaccagcgaacacctcagcacaaaaggctgaattgatcaccctcactcaggctctccgataaagtagaataaacgtattaacatttacagtgacagcaagtatgcctttgctactgtgcatgtacgtaaagccatctaccaggaaggcaggctactcacctcagcaggtagctgtgatccactgcaaaggacatcaaaaagaaaatacggcc

SEQ ID NO: 952 - DNA, 6553 bp, Homo sapiens
atgcttaattgcacatgtttgactaagaaaagcacaaagtatttaagctcatctgtagttcaaactgcctatccgtgtatttgtccattcatcctgattcatttattgagcaattcttttgtgccaggcactgtgctgggtgctggtaatgcaatgatgaagatggcaggcatgactctgccctccaggagtttctaggatgctgagggagacaaacaaaaaataagtaaatccatgaaagaagtattggtgggacctgcccccaatatttcaacataggttctttctattttccataaatgtcagccagctgagaaataaagagacagtacaaagagaggcattttacagctgaaccactgggggtgacattacatattggtaggaccatgatgccccctgagtctcagaccagcaagtttttattaagggtttcaaaaggggaaggggtgtaagaagagggagtaggtacaaagatcacatgcttcaaagggcaaaaagcagaactactagtaagggtctaacaaagatcacatgcttctgagggaacaggacaaaggcaaaagcagaactactaataagggtccagcaaagatcacaaagcaaaagccaaaagcagaaccactgataagggtctatgttcagcagtgcacgtattgtcttgataaacatcttaaacaatagaaaatggagttcaagtgcagagaactagtctgaccacaaatttaccagggtggagtttttccccaccctagtaagcctttgggtactgcaggagaccagggcgtatctcagtccttatctcaacagcataagacagacattcccagagcggccatttattgacctcaccccaggaatgcattcagttcccagcgtattaatattaatattccttgctaggagaagaatttagttgtatctctcctacttgcatgtccgtttatagactctttgcaagaagaaacatatggctcttattgcccaaccctgcaggcagtcagaccttatggttgtcttcccttgttccctaagaatcgctgttattctcttctttttcaaggtgcactgatttcatattgttgaaacacacgttttacaatcaatttgtacagttaacaaaattttcacaatggtcctgaggtgatgtacatcctcagcttatgaatataacaggattaagagattaaagtaaagacaggcataagaaattacaaaagcattatttgggaactgataaatgtccatgaaatcttcacaatttatgttcctctgccgtggctccagccagtccctccatttggggtccctgacttcccacaacaagaaataataagaggttaaggtggagaagagcaaggaagtccactttataaaggggtcaggaaaaagctctctgtggaagcaccatcttagctgagacctaaaggatggtctaatttggggaggtgcagaggaaaatcattccaggctgaagcagcaagtgcaaaggccctgttgtggagaaaggtttgaaagtccaaggaaacaaaggaggccagagtgtccgaaatagagtaggccaaggggaggagacaggagagggctggagaggcagcaggaacaggcagaagactcggggtctcgattttattatatgtgccatgggcaggaaaggcagagatgagactcaatggacaccttaagatcactgaagctgccaggtgggaaatggattgctgagcatggagagcaggtgcagaggaccagttaagaccagttaggaggctgctgctgtaacccagctgggatagctgtgtcctaggcaaagataacaacaatgaggatagagagagtggacacgttggataaagtttagaatcacggaacttgctgactggagaagagggcaaaagcagagttagcacaacacatgagttatgaccagcttgagcagctcagcagggggtggtgccatttacagaacagagatggcatggacagagcccatggagaaggaggaggaaaaagagagtttggctttgggttttttttttaagacagggtctctggctctgtcacccaggctggagtgcattggtgcaatcatagctctttgcagcctcaaactcctgggctcaagtgatcctcctgcctcagcctcccaagtagcaggattacagatcctacagatgcacatcaccatgcctagctaatttttttttttttttttttttgtagatagggagtcccactgtgttttccaggctggcttcaaactcctggcctcaagtaatcctcccacctcggcctcccatagcactgagattacagccatcacctaccactccaagccatgagtttggctttggatgtaacaaggttgaggtgttcatgagttgacaagtggaaaaaacaagaaagaagttgcgtgtttaagactgctgtttgaaggagaagtttagcctccagacaaaagttcaggactcatcagctgagaaatggcaccgaaaattatgcaaatggatgagctcagctagcaaacaagtccagagagagcaaaaagtccagagagagcagcactgggccatgcacctggcctaatgccaccccactcctcccaatccctgtgttatgctggagagggttcagcctctggtgagtttcaccaaaccctcacatctctttcttctgagaccttctctaagatcccctcttttatacttagtgaaatgggattctctttttcccatccagcttaagcaaaaacttttgattatgagaagaatgaggatgcatttagtatctgttctgcacagctaagtccatcaaagatttctcattattcacgcctggcagtctcattttctcctttcacctctcagagcacagtcgtagccttaattactgagtttttcacccctctaacactagcgatttcccttatctcagttctcaggaagttctgttcacagatttatctcctgaatcctcacctggggatagaaattgttctctgtggccatgtctttccctctaattcttatcaaaaaacacagtgatctctgtgcatcaaatattaagctcaagcttaacagatcatgcttctggcttctctctgtctctggcttgtgggttaacaggtttgcaacctttgcagagaagccaccaaattctcagtaggccagagtttccaagggtgctggtcactcttgctctttttctcctgctggaaattcagcactagagagtgttacaccattgcacctgcagaggagttcatctgactccagggactacagaggagggaggcgggtaaactaacaggcattcagaaaatggctaccacaatggggaagaaaatgaaagtcaaaccaaataagcaatggtcaaaaaaaaaaaaaaatctagagggcagctgcagtggctcacacgtgtaatccaagcactttgggaggccgaggcaggtggatcacttgacatcaggagtttgagaccagcctgggcaacacagtgaaatcacatctctactaaaaatacaaaaattagccaggtgtcgtggtgggcacctgtaatctcagcattttgggaggctgaggtgggtggatcacctgatgtcaggagtttgagaccagcctggccaacatggtaaaaccctatttctattaaaaaatacaaaaattagccaggtgtcatggtaggcgcctgtaatcccagctacttgggaggctgaggcaggagaattgcttgaacccaggagacagaggttgcagtgagcaaagattgcaccactgcactccagcctgggcaacagtgagaatttgtctcaaaaaaaaaaaaaaaaaaaaaacctagagatgtccatccaggctgaagagaatattccagagcaggggttgggacactatggcccatgggccaaatctgacctgcctgcacatgtttttctcaataaagttttatcgaaacacagccatgcccatttgctacatattgtctatgattgctggattaggctgttctctcatgctataaagaaatacctgacactgggtttacttggctcacagttgtgtaggctgttcagggaacatgacaatgacatctgctgagcttctgtggaggcctcaggaaacttacaatcatggccgaagttgaagtgggagcaagagagtgaggagggaggtgttacacactcataaacaaccagatcttgcaagaactcactcaccattgcaaggacaggaccaaaagcatgatgctaaatcattcatgagaaatgcacccccatgatccaatctcttcccaccaggccccacctctaacactgttgattacattgtaacatgagatttgggtggggacacataatcaacctatatcagctgctttcatgctatgggtggcagagttgagtaactactacaggagactgtatggcccatgaattctaaaatatttactatctgatgctttcaagaaaaagtttgcaaaccctgctcttgaaaaggaagggagggaagaggagaggaggaaggcaggaaggagcagagagggacacggggctgtattcaaacatctgttgttaagaaagagaaattcaaagcatctggcatggcccaagttatcaaactaggagcactccattgaagtttcaggacaaacactgtgctgaatataaggatgaccccatctgtaatgcctaactttgtttttattaactttgttcttagactttccttttcttttaatcacttagccttgtttctacctgaattgactgtcttttagctaagagagctagacagactttatcttggctctttcaccggcagccccttccctcaaggacttaacctgtgcaagctgactcttagcacatctaagaatgcaattaactgataagatactgtggcgagcaatatccgcagttcccaggaattcgtccgattgataatgcctaaagccccgcatctatcactttgtaatagtcttaaaccccttagacctagaactgtttactttcctgtaataatttatccttttaacttttttgcctactttacttctgtaaaattcttttaactagacccccttcccctttctaaactaaagtataaaagaaaatctagccccttcttcggggccaagagaactttaagcattagccgtctcttggccgccggctaaagaaacagactcttaattcacctcaaagtgtggcattttctctaactcgctcaagtacaacatttggaggcccgagcaagaaacgccaccaggcgagagccgggttagctccgggcctgctgcgggctcccccggaaggacggccggcttgtagcgggggcgccacctgaaaaaaaattttcaggtccccgaaaggtgaccatcttccaaaggagagcggatcgactactgtgtgggtgcccacaaaaattccacctctgagtcctcaacttctgaccccaaggtcaggtaggtcagatctgacttcagttctagtaagagggaagcggccctgatgagggcgtccctcttttgactctgcccgtttctttaggacgctagaaggtagagctctggttttctgttaggcacctctgtgtctctgtctaggagggaactggccctgacagggaccctctcttgactcagtccacatcccaggatgctggaggactgagtcctggtttctggcaggccagtcactctctctctctcttttcctatctctagtctttctcttgttcaagtttcttgaagaatctccaagaaagaaaaaaaaaaactgttataaactctgtgtgaataatgaatgaatgagggaggacaagggcttgcgcttgtcctccagtttgtagctacacggtgaaagctacggagttcaagtgggccctcacctgcggttccgtggcgacctcataaggcttaaggcagcatcaggcacagctcgatccgaggtggaagtttataccggcctgccaatgctaagaggagcccaagtcccctcagcgggagtggccagacaggcatctgactgataccatcacaggaccccctccccttgtctgtctaaaaaaaaaaaaaaaaaaaaaagggacaaactgtcataactgtttacatgccctaaagtcaattgattatgttgcttgttctgttcagtgtctattgtcttgttagtagttgtgaaagttttcatgtcaagacggtgatattgcccaagacgtctaagtaaaaacttcttcaaagtccttagtgctgattttttgtcacaggatgttaaatttctcatcaatcatttaggctgaccaccacagtcctgtcttttctgccagaaggaagtcaagtgttgttacaagaacaagtgtgaaaaacattttcctgattaagatttctagcaccatgaaagttgtaagtatttagattgtcgtaccccacgtccaagtgattagacctcctctaaagtaaaccagtagtaagttcaaaacagccaccctgcagatttccttgctcacctcttttgtcattctgtaacttttcctgtgcccttaaatagaacactgtgtaaaga

SEQ ID NO: 953 - DNA, 191 bp, Homo sapiens
tttgagatggagttttgctcttgttgcccaggctggagtgcaatggcacgatctcagctcaccgcaacctacacctcccaggttcaagcgattctcctgcctcagcccccctagtagctgggattacaggcatgtgccaccacacctggctaattttgtatttttagtagagacggggtttctccatgttg

SEQ ID NO: 954 - DNA, 224 bp, Homo sapiens
cagaacccaaatcatcctgaccactagactgtcctaactagggtttcttaccaaaagcaaaggcatttttaaagttcgtgacatttaaacaaaagagcaaataccaatatctgccactttgtcaggctaacaaacccaaacaaagccaacagccagaagttaaaagaaacggatcattaggttgaaaacagaactgtcaaaacaggcaaaattgactttgttta

SEQ ID NO: 955 - DNA, 467 bp, Homo sapiens
agggcaggtgcagaggaccagttaagaccagttaggaggctgctgctgtagcccagctgggataagggtgtcctaggcaaagataacgacagtgaagatagagagagtggacaagttggataaagtttagaatcacaggacttgctgactggagaagagggcaaaagcagagttagcacaacacatgagttatgaccaccttgagcagctgagcagggggtggtgccatttacagaacagagatggcacagacagagcccatggagaaggaggaggaaaaggagagtttggctttgggtttttttaagacagggtctggctctgtcacccaggctggagtgcagtggtgtgatcagagctctttgcagcctcaaactcctgggctcaagtgatcctcctaccttagcctcccaagtagcaggactccagatcctacagatgcacatcaccatgcctagctaattttt

SEQ ID NO: 956 - DNA, 615 bp, Homo sapiens
aagttctcaccctttgaaatcatgtataagaaggcgctgcctatcttgcctaagctaagagataccaaattagcagaattatcacaaactaatttattacagtacctgtagtctctccaacaggtacaagagatcatcctgccacttgctcgaggagcccatcccaatccaattcctgaccagacaaattcctgccattcattccagccaggagacctagtgtttgttaaaaagttccaagaagaaagactcactcctgcttagaaaagacctcacaccgtcatcctcacgactccaactgctctgaaagtagacagccttcctgcttagattcatcactcccgcatcaaaaaggccaacagagcccagctaaaaacataagtccccaggcctaagtcaggccccttaaaactgcacctaagtcaggtgaagccattagattcattctttttatctacctcacttatttgtttttgccagttacatcctccgtgccttcctactcctttctcctcacctctttcacaacaggacgtgtatttgcaaacaccacttggaaggccagtacctccaaggaagtctcctttgcagttgatttatttgtactgttcccaa

SEQ ID NO: 957 - DNA, 225 bp, Homo sapiens
ccagaacccaaatcatcctgaccactagactgtcttaactagggtttcttaccaaaagcaaaggcatttttaaagttcgtgacatgtaaacaaaagagcacataccaatatctgtcactttgtcaggctaagaaacccaaacaaagccaacagtcagaagttaaaagaaacagatcattaggttgaaaacagaactgtgaaaacaggcacaattgacttcattta

What is claimed is:

1. An isolated nucleic acid molecule comprising a polynucleotide having a nucleotide sequence at least 95% identical to a sequence selected from the group consisting of:
(a) a polynucleotide fragment of SEQ ID NO:X or a polynucleotide fragment of the cDNA sequence contained in Clone ID NO:Z, which is hybridizable to SEQ ID NO:X;
(b) a polynucleotide encoding a polypeptide fragment of SEQ ID NO:Y or a polypeptide fragment encoded by the cDNA sequence contained in cDNA Clone ID NO:Z, which is hybridizable to SEQ ID NO:X;
(c) a polynucleotide encoding a polypeptide fragment of a polypeptide encoded by SEQ ID NO:X or a polypeptide fragment encoded by the cDNA sequence contained in cDNA Clone ID NO:Z, which is hybridizable to SEQ ID NO:X;
(d) a polynucleotide encoding a polypeptide domain of SEQ ID NO:Y or a polypeptide domain encoded by the cDNA sequence contained in cDNA Clone ID NO:Z, which is hybridizable to SEQ ID NO:X;
(e) a polynucleotide encoding a polypeptide epitope of SEQ ID NO:Y or a polypeptide epitope encoded by the cDNA sequence contained in cDNA Clone ID NO:Z, which is hybridizable to SEQ ID NO:X;
(f) a polynucleotide encoding a polypeptide of SEQ ID NO:Y or the cDNA sequence contained in cDNA Clone ID NO:Z, which is hybridizable to SEQ ID NO:X, having biological activity;
(g) a polynucleotide which is a variant of SEQ ID NO:X;
(h) a polynucleotide which is an allelic variant of SEQ ID NO:X;
(i) a polynucleotide which encodes a species homologue of the SEQ ID NO:Y;
(j) a polynucleotide capable of hybridizing under stringent conditions to any one of the polynucleotides specified in (a)-(i), wherein said polynucleotide does not hybridize under stringent conditions to a nucleic acid molecule having a nucleotide sequence of only A residues or of only T residues.

2. The isolated nucleic acid molecule of claim 1, wherein the polynucleotide fragment comprises a nucleotide sequence encoding a protein.

3. The isolated nucleic acid molecule of claim 1, wherein the polynucleotide fragment comprises a nucleotide sequence encoding the sequence identified as SEQ ID NO:Y or the polypeptide encoded by the cDNA sequence contained in cDNA Clone ID NO:Z, which is hybridizable to SEQ ID NO:X.

4. The isolated nucleic acid molecule of claim 1, wherein the polynucleotide fragment comprises the entire nucleotide sequence of SEQ ID NO:X or the cDNA sequence contained in cDNA Clone ID NO:Z, which is hybridizable to SEQ ID NO:X.

5. The isolated nucleic acid molecule of claim 2, wherein the nucleotide sequence comprises sequential nucleotide deletions from either the C-terminus or the N-terminus.

6. The isolated nucleic acid molecule of claim 3, wherein the nucleotide sequence comprises sequential nucleotide deletions from either the C-terminus or the N-terminus.

7. A recombinant vector comprising the isolated nucleic acid molecule of claim 1.

8. A method of making a recombinant host cell comprising the isolated nucleic acid molecule of claim 1.

9. A recombinant host cell produced by the method of claim 8.

10. The recombinant host cell of claim 9 comprising vector sequences.

11. An isolated polypeptide comprising an amino acid sequence at least 90% identical to a sequence selected from the group consisting of:
(a) a polypeptide fragment of SEQ ID NO:Y or the encoded sequence contained in cDNA Clone ID NO:Z;
(b) a polypeptide fragment of SEQ ID NO:Y or the encoded sequence contained in cDNA Clone ID NO:Z, having biological activity;
(c) a polypeptide domain of SEQ ID NO:Y or the encoded sequence contained in cDNA Clone ID NO:Z;
(d) a polypeptide epitope of SEQ ID NO:Y or the encoded sequence contained in cDNA Clone ID NO:Z;
(e) a full length protein of SEQ ID NO:Y or the encoded sequence contained in cDNA Clone ID NO:Z;
(f) a variant of SEQ ID NO:Y;
(g) an allelic variant of SEQ ID NO:Y; or
(h) a species homologue of the SEQ ID NO:Y.

12. The isolated polypeptide of claim 11, wherein the full length protein comprises sequential amino acid deletions from either the C-terminus or the N-terminus.

13. An isolated antibody that binds specifically to the isolated polypeptide of claim 11.

14. A recombinant host cell that expresses the isolated polypeptide of claim 11.

15. A method of making an isolated polypeptide comprising:
(a) culturing the recombinant host cell of claim 14 under conditions such that said polypeptide is expressed; and
(b) recovering said polypeptide.

16. The polypeptide produced by claim 15.

17. A method for preventing, treating, or ameliorating a medical condition, comprising administering to a mammalian subject a therapeutically effective amount of the polynucleotide of claim 1.

18. A method of diagnosing a pathological condition or a susceptibility to a pathological condition in a subject comprising:
(a) determining the presence or absence of a mutation in the polynucleotide of claim 1; and
(b) diagnosing a pathological condition or a susceptibility to a pathological condition based on the presence or absence of said mutation.

19. A method of diagnosing a pathological condition or a susceptibility to a pathological condition in a subject comprising:
(a) determining the presence or amount of expression of the polypeptide of claim 11 in a biological sample; and
(b) diagnosing a pathological condition or a susceptibility to a pathological condition based on the presence or amount of expression of the polypeptide.

20. A method for identifying a binding partner to the polypeptide of claim 11 comprising:
(a) contacting the polypeptide of claim 11 with a binding partner; and
(b) determining whether the binding partner effects an activity of the polypeptide.

21. The gene corresponding to the cDNA sequence of SEQ ID NO:Y.

22. A method of identifying an activity in a biological assay, wherein the method comprises:
(a) expressing SEQ ID NO:X in a cell;
(b) isolating the supernatant;
(c) detecting an activity in a biological assay; and
(d) identifying the protein in the supernatant having the activity.

23. The product produced by the method of claim 20.

24. A method for preventing, treating, or ameliorating a medical condition, comprising administering to a mammalian subject a therapeutically effective amount of the polypeptide of claim 11.
